(19) United States
(12) Patent Application Publication
(10) Pub. No.: US 2025/0026795 A1
(43) Pub. Date: Jan. 23, 2025

(54) FUNCTIONAL AAV CAPSIDS FOR INTRAVITREAL ADMINISTRATION

(71) Applicant: SHAPE THERAPEUTICS INC., Seattle, WA (US)

(72) Inventors: Thomas PACKARD, Seattle, WA (US); Adrian Wrangham BRIGGS, Seattle, WA (US); David Jeffrey HUSS, Seattle, WA (US); Francois VIGNEAULT, Seattle, WA (US); Ronald James HAUSE, JR., Seattle, WA (US); Yue JIANG, Los Angeles, CA (US); Kevin Christopher STEIN, Kenmore, WA (US); Bora BANJANIN, Seattle, WA (US)

(21) Appl. No.: 18/714,509

(22) PCT Filed: Nov. 30, 2022
(86) PCT No.: PCT/US2022/051451

§ 371 Date: May 29, 2024

Related U.S. Application Data
(60) Provisional application No. 63/346,295, filed on May 26, 2022.
(60) Provisional application No. 63/284,962, filed on Dec. 1, 2021.

(51) Int. Cl. C07K 14/005; A61K 48/00; A61P 27/02; A61P 27/06; A61P 35/00; C12N 15/86

(52) U.S. Cl. CPC C07K 14/005; A61K 48/0075; A61P 27/02; A61P 27/06; A61P 35/00; C12N 15/86; C12N 2750/14122; C12N 2750/14143

(57) ABSTRACT

Disclosed herein are engineered AAV VP capsid polypeptides with the ability to assemble into virus particles and having improved tissue tropism to eye tissues, for example, retinal tissues, retinal pigment epithelial cells, or photoreceptor cells. The capsids are engineered using the high throughput discovery system described herein. In certain embodiments, provided herein are recombinant adeno-associated virus (AAV) VP capsid polypeptides having at least one mutation in a 581 to 589 region of the VP capsid polypeptide, corresponding to residues 581 to residue 589 of a VP1 polypeptide of SEQ ID NO: 1.

### CROSS-REFERENCE

[0001] The present application claims the benefit of U.S. Provisional Application No. 63/284,962, entitled “FUNCTIONAL AAV CAPSIDS FOR INTRAVITREAL ADMINISTRATION,” filed on Dec. 1, 2021, and U.S. Provisional Application No. 63/346,295, entitled “FUNCTIONAL AAV CAPSIDS FOR INTRAVITREAL ADMINISTRATION,” filed on May 26, 2022, which applications are each herein incorporated by reference in their entireties for all purposes.

### BACKGROUND

[0002] Recombinant adeno-associated viruses (rAAV) provide the leading platform for in vivo delivery of gene therapies. Current clinical trials employ a limited number of AAV capsids, primarily from naturally occurring human or primate serotypes such as AAV1, AAV2, AAV5, AAV6, AAV8, AAV9, AAVrh.10, AAV4rh.74, and AAVhu.67. These capsids often provide suboptimal targeting to tissues of interest, both due to poor infectivity of the tissue of interest and competing liver tropism. Increasing the dose to ensure infection of desired tissues can lead to dose-dependent liver toxicity. In addition, use of naturally-occurring capsids presents an immunological memory challenge—pre-immune patient populations are excluded from treatment and repeat dosing in a previously immune naïve patient is often not possible. Thus, there is a need for additional AAV capsids for use in gene therapy, in particular capsids that confer upon the rAAV high infectivity for specific tissues, such as ocular tissues.

### SUMMARY OF THE INVENTION

[0003] Described herein is a system for high throughput engineering of functional AAV capsids with altered tropism for various tissues, and using this system, have identified capsid variants with increased tropism for target tissues, such as eye tissues.

[0004] In various aspects, the present disclosure provides a viral protein (VP) capsid polypeptide comprising a 581 to 589 region corresponding to residues 581 to 589 of an AAV5 VP1 polypeptide, wherein the 581 to 589 region comprises a sequence of SEQ ID NO: 5014 and further comprises at least one substitution relative to SEQ ID NO: 9; and wherein the 581 to 589 region comprises one or more basic amino acid residues.

[0005] In some aspects, the 581 to 589 region comprises more basic amino acid residues than acidic amino acid residues. In some aspects, the acidic amino acid residues are selected from the group consisting of D and E. In some aspects, the basic amino acid residues are selected from the group consisting of K, R, and H.

[0006] In various aspects, the present disclosure provides a viral protein (VP) capsid polypeptide comprising a 581 to 589 region corresponding to residues 581 to 589 of an AAV5 VP1 polypeptide, wherein the 581-589 region of the VP capsid polypeptide comprises a sequence of SEQ ID NO: 5014, wherein X¹, X², X³, X⁴, X⁵, or X⁶ of SEQ ID NO: 5014, or any combination thereof is K or R.

[0007] In some aspects, X¹ of SEQ ID NO: 5014 is K or R. In some aspects, the 581 to 589 region of the VP capsid polypeptide has a sequence of any one of SEQ ID NOs: 1726, 374, 1442, 933, 1748, 4142, 1434, 1358, 1191, 3732, 4110, 4039, 4411, 4506, 4270, 4156, 3780, 4036, 4030, 4016, 1550, 3899, 1247, 1855, 1181, 3919, 1639, 3664, 1244, 4140, 3930, 4117, 4189, 4001, 3799, 3643, 3619, 1240, 1686, 1479, 1307, 1575, 4296, 1665, 3871, 4135, 1605, 4408, 3604, 1274, 4149, 1313, 3741, 1938, 3709, 1727, 3893, 1280, 3622, 1784, 3834, 1752, 1983, 1743, 3979, 4461, 4113, 3817, 4232, 1340, 1489, 4214, 3902, 1857, 2510, 2316, 1904, 1219, 1486, 1512, 1481, 1516, 3820, 3789, 4252, 4047, 4330, 4082, 4094, 1574, 1248, 4078, 1872, 1426, 3785, 3687, 4318, 4243, 3866, 3704, 4172, 1621, 4315, 1192, 1513, 1856, 2476, 3324, 2769, 2678, 1561, 3296, 375, 2343, 2348, 376, 377, 1395, 1584, 4093, 4453, 3940, 3778, 4374, 4210, 4009, 4264, 4339, 4368, 1738, 378, 1610, 4194, 4474, 4013, 4266, 1771, 1759, 1922, 3860, 3832, 1349, 1381, 3663, 1642, 1185, 4356, 3932, 1233, 4212, 3858, 1198, 4192, 3611, 1919, 1819, 3790, 3712, 1969, 4095, 1887, 4468, 1720, 4247, 934, 1790, 2002, 1657, 1663, 1336, 3894, 1554, 1494, 1405, 3576, 4314, 3695, 1851, 1850, 4362, 1815, 3845, 4511, 3656, 3638, 1406, 1596, 4454, 1443, 1661, 935, 4504, 1359, 1734, 3650, 1910, 1305, 1648, 3831, 4435, 1208, 1988, 4451, 1993, 1986, 3849, 1718, 4068, 1835, 1425, 1428, 1282, 4380, 1658, 1452, 1687, 4024, 379, 4072, 3791, 4491, 4323, 4014, 1304, 1440, 1511, 1981, 1676, 1547, 4422, 1283, 3861, 1383, 3644, 3691, 4259, 1749, 1418, 1176, 4216, 1924, 1421, 1387, 3992, 4423, 4253, 1618, 1871, 1256, 3748, 4119, 1297, 1586, 1251, 1299, 1954, 4450, 3990, 4029, 4097, 3890, 3796, 1389, 3711, 4344, 1578, 1476, 4343, 1202, 4413, 4384, 3808, 1647, 1475, 3892, 3674, 1739, 3926, 3595, 1943, 3756, 4405, 3973, 4109, 4159, 3744, 4387, 1960, 4275, 3781, 1535, 1210, 4492, 4365, 4118, 3655, 3886, 4278, 4383, 4485, 1392, 3751, 3931, 3986, 3678, 1249, 4353, 4208, 3710, 4238, 4213, 3969, 4436, 3175, 4128, 2970, 1228, 3534, 3437, 3406, 3641, 3639, 3954, 4335, 3995, 3582, 4475, 3784, 4470, 4010, 3802, 3941, 4427, 4396, 4348, 3587, 3818, 3864, 3956, 3863, 3731, 3814, 4067, 4354, 4350, 4334, 3821, 1932, 3929, 4171, 1258, 3824, 3631, 4465, 4494, 1320, 1398, 3828, 1204, 1223, 1284, 1685, 3773, 4209, 3014, 4462, 4246, 4190, 4312, 4023, 3760, 3753, 1178, 3884, 2783, 4038, 3545, 2916, 3112, 2834, 3880, 3673, 4102, 4399, 4048, 3752, 4207, 1235, 3943, 4355, 4087, 4100, 4327, 4037, 4163, 3918, 4486, 1243, 3933, 4178, 1662, 1643, 4152, 3634, 3617, 4445, 4303, 1370, 3838, 4199, 4284, 1213, 4382, 1399, 1187, 3714, 1828, 4487, 3615, 1842, 1501, 3746, 4018, 4420, 3606, 4121, 3724, 3935, 1941, 4419, 4282, 1955, 1949, 4310, 4488, 1577, 4127, 1288, 1171, 3670, 4052, 3627, 3777, 936, 1371, 3685, 1325, 1940, 380, 4482, 4258, 3812, 1581, 1860, 4124, 4508, 4500, 3652, 3972, 1309, 1630, 1528, 3717, 1217, 3692, 4430, 3764, 4316, 4285, 3645, 3971, 4421, 1172, 4026, 2740, 3125, 3546, 1725, 1206, 3842, 4404, 3690, 3962, 4513, 4340, 4329, 4410, 3703, 4136, 1763, 1487, 3589, 3907, 4153, 2707, 3730, 4426, 4180, 4041, 3923, 4444, 3851, 4429, 4361, 1441, 4394, 4302, 3758, 4510, 3742, 1868, 4077, 1710, 1939, 1335, 1666, 1407, 4187, 1193, 1188, 1196, 1724, 1717, 1200, 1646, 1997, 1975, 1701, 4280, 1613, 4006, 1984, 1351, 3653, 3833, 1593, 2561, 4442, 3900, 4298, 1761, 4388, 1820, 1597, 4317, 4249, 1341, 1203, 1680, 4441, 3628, 3725, 1945, 937, 4206, 1588, 1439, 3794, 4447, 1838, 3776, 3658, 4064, 1377, 4011, 4272, 4503, 1324, 1367, 3594, 3680, 1300, 1750, 938, 3913, 3774, 1877, 1987, 1862, 3998, 1380, 4185, 3686, 3696, 4463, 1350, 4008, 4230, 3853, 4244, 4083, 381, 1909, 3897, 1546, 382, 3613, 3273, 3452, 3525, 1229, 4105, 3835, 383, 1263, 1234, 3970, 1492, 3856, 3586, 1175, 4321, 4020, 4144, 1224, 1199, 3667, 2778, 4412, 4407, 1812, 1810, 3823, 1416, 1427, 1507, 1878, 4333, 3146, 4281, 4211, 1179, 3843, 1669, 1677, 1524, 1525, 1974, 384, 1979, 1456, 1239, 4167, 3740, 1876, 1388, 1967, 1474, 385, 1342, 1471, 4176, 1232, 1989, 4125, 1741, 1508, 1580, 4060, 4378, 1576, 1212, 1893, 3921, 3585, 1174, 1396, 4061, 4015, 1207, 3698, 3825, 3922, 4021, 4181, 1598, 1916, 1429, 4502, 4231, 1321, 4390, 3693, 3734, 1382, 3684, 1747, 3806, 3896, 3635, 1768, 4025, 3976, 3840, 3963, 4286, 1502, 3836, 4161, 3659, 3743, 4130, 3605, 1385, 1783, 4392, 4328, 1316, 4173, 4265, 1246, 1985, 1629, 1829, 1737, 3826, 1473, 1992, 1883, 1656, 1837, 1914, 1839, 1834, 3984, 4495, 3910, 4160, 3671, 4184, 4132, 4250, 1503, 1237, 1523, 1417, 4063, 1562, 3977, 1971, 1707, 1847, 1792, 3769, 4074, 1534, 4239, 4003, 3915, 1689, 1776, 1599, 1265, 1410, 1823, 1498, 1329, 939, 386, 940, 387, 1655, 3874, 4261, 3626, 1791, 3579, 1644, 3936, 4054, 4260, 4359, 4131, 4297, 4357, 4022, 3770, 4046, 1222, 1996, 3788, 4169, 1925, 3953, 4228, 4226, 4277, 4101, 1889, 1369, 3797, 4088, 4019, 3771, 3632, 1402, 388, 1520, 1767, 1466, 1194, 4137, 1908, 1927, 1758, 3772, 3661, 4186, 4174, 1170, 3850, 1315, 1611, 1530, 1859, 2209, 4183, 1408, 1403, 941, 4033, 3623, 3596, 1461, 1848, 1173, 1928, 1459, 1765, 1826, 3719, 1931, 3584, 4004, 3591, 3967, 4168, 3957, 3878, 4165, 4191, 3980, 4058, 4200, 4336, 3958, 1260, 4051, 3798, 4032, 1774, 4322, 3991, 4106, 1641, 1570, 3978, 3965, 4464, 3813, 4154, 1365, 4257, 3846, 4345, 4379, 3603, 1693, 3937, 3801, 1787, 1214, 4483, 4201, 1898, 1845, 1226, 1220, 4245, 1347, 3867, 1900, 3640, 3916, 4089, 1209, 3745, 3988, 3975, 4236, 4075, 4146, 4256, 4308, 4000, 4148, 3588, 3868, 4403, 3883, 4326, 4393, 3895, 4237, 3955, 3727, 4005, 4092, 4372, 4283, 1553, 3805, 4151, 1281, 1681, 4489, 3982, 4437, 3597, 4342, 3872, 3987, 4490, 3876, 3668, 4300, 1679, 1242, 3598, 3583, 3647, 389, 4304, 3793, 3779, 1937, 1907, 4042, 3648, 3996, 3800, 4367, 4099, 1807, 3887, 4428, 1625, 1390, 1884, 1682, 4364, 4306, 3869, 1278, 1672, 942, 1505, 1542, 1709, 1915, 3600, 3914, 1968, 3948, 1670, 3811, 1865, 1362, 943, 1716, 3961, 1506, 4221, 1376, 944, 1683, 4276, 1445, 1721, 1632, 3607, 1328, 1455, 1913, 1497, 1317, 1951, 1778, 1379, 3768, 4225, 1668, 1514, 4002, 3679, 3964, 3707, 3666, 1348, 4273, 1804, 4497, 571, 1401, 4438, 1895, 1264, 572, 1912, 573, 3939, 4170, 4056, 1271, 1065, 1521, 1221, 1066, 1451, 1654, 1067, 3934, 4080, 4352, 574, 1700, 3739, 1565, 1419, 1811, 3950, 1690, 1397, 3716, 1569, 1465, 1437, 1674, 4337, 1285, 4268, 1183, 3726, 3881, 4134, 4347, 4012, 3938, 4066, 4198, 4416, 4164, 3630, 4229, 4292, 4193, 4325, 4375, 4371, 4432, 4215, 1753, 3944, 1409, 4195, 1729, 4223, 1540, 4455, 1068, 1069, 4512, 1723, 1070, 3750, 3633, 4070, 4104, 4162, 4235, 1863, 4346, 1881, 1071, 1814, 1572, 2418, 575, 4443, 3761, 1346, 1587, 1072, 3592, 576, 1891, 4469, 2430, 1275, 577, 1950, 1963, 4129, 1073, 1296, 1360, 1551, 3733, 4111, 3993, 4108, 3949, 1287, 1713, 1556, 1736, 1995, 1435, 1424, 1830, 1705, 1861, 1197, 1254, 4120, 1545, 4417, 1469, 1292, 2185, 2279, 1785, 1236, 4293, 1827, 3839, 3983, 4395, 1957, 2222, 578, 3928, 4295, 3715, 3855, 3609, 1990, 4076, 4175, 3927, 1757, 1650, 4299, 1773, 2004, 1267, 1364, 579, 1462, 1879, 4007, 3729, 3665, 3722, 1691, 1712, 1074, 1624, 1751, 1394, 3924, 3952, 580, 581, 2003, 1343, 2203, 1559, 1250, or 1555.

[0008] In some aspects, X² of SEQ ID NO: 5014 is K or R. In some aspects, the 581 to 589 region of the VP capsid polypeptide has a sequence of any one of SEQ ID NOs: 752, 2144, 1653, 1205, 3795, 753, 4288, 4219, 2770, 2962, 4241, 4107, 2718, 3317, 4391, 4053, 3263, 2553, 3947, 2710, 2608, 3467, 2796, 2961, 2529, 3320, 2674, 2635, 3446, 3053, 3250, 3688, 1182, 1998, 4320, 3351, 2655, 3514, 2779, 3194, 3319, 3224, 3281, 3708, 2807, 3562, 3274, 3374, 3013, 3416, 2981, 3065, 2777, 3469, 2977, 2638, 2972, 3059, 2574, 3380, 4262, 3167, 3368, 2781, 3547, 3386, 1225, 2960, 3485, 3370, 3443, 2824, 754, 1467, 3327, 3178, 3006, 3252, 2991, 3470, 2888, 2572, 3418, 2642, 2519, 3363, 1308, 1230, 3960, 1378, 2994, 3080, 2589, 3681, 51, 1413, 775, 776, 78, 1560, 4289, 3757, 79, 3593, 4043, 1806, 3908, 4397, 1615, 4415, 3723, 2006, 3754, 1470, 4360, 80, 3945, 2854, 3523, 3669, 1356, 777, 778, 87, 3891, 4456, 4040, 4496, 1982, 2001, 1478, 1189, 120, 4791, 2158, 121, 803, 804, 1463, 805, 122, 2139, 2290, 1760, 2465, 123, 130, 131, 132, 4933, 808, 2336, 2026, 2204, 809, 810, 2166, 208, 209, 210, 835, 836, 1334, 837, 3901, 3312, 2649, 1301, 211, 212, 1450, 4386, 3028, 213, 1446, 214, 2206, 215, 1896, 1522, 3490, 838, 216, 234, 4962, 2269, 843, 235, 844, 236, 237, 4930, 845, 846, 238, 847, 1295, 3601, 3877, 1930, 1420, 1678, 1460, 285, 1626, 299, 3809, 4271, 3844, 1436, 300, 1515, 1617, 3646, 4059, 1431, 1331, 310, 3804, 1363, 1934, 1602, 1404, 4188, 1330, 4349, 3337, 3533, 2629, 3038, 2539, 3567, 3291, 3348, 3115, 3359, 2993, 3079, 3506, 2527, 2963, 2938, 2516, 3113, 1345, 2639, 3143, 3044, 2747, 3154, 3280, 3039, 2743, 2902, 3056, 2554, 2522, 3103, 3210, 3434, 2656, 4251, 4166, 4196, 3206, 3328, 2588, 3553, 2714, 3078, 3222, 3137, 3357, 2717, 2944, 3012, 3220, 3202, 2811, 3083, 3269, 3566, 2699, 2515, 3023, 2533, 3288, 3075, 3005, 2685, 3058, 2976, 2622, 3333, 3463, 2939, 3521, 3268, 3117, 2626, 2616, 3240, 2570, 3565, 2919, 3157, 2849, 3444, 2631, 3420, 2659, 3325, 3186, 2920, 3258, 3440, 3457, 3310, 2761, 3134, 2621, 3531, 2711, 2774, 2867, 2585, 3155, 2620, 3156, 2844, 3126, 3160, 2909, 3542, 3225, 2887, 3474, 3218, 2744, 2896, 3135, 3424, 3498, 3529, 2661, 2667, 2549, 2819, 2768, 2935, 3182, 2772, 3230, 3043, 2922, 3581, 3524, 2869, 2610, 3298, 2775, 3108, 2603, 3614, 2612, 2860, 3187, 3238, 3786, 4385, 3016, 3436, 2876, 2987, 3532, 3438, 3561, 3259, 2663, 2890, 3433, 3071, 3018, 2580, 2755, 3015, 2540, 3398, 2664, 2583, 2830, 2644, 2641, 3513, 2725, 2723, 3338, 3556, 2866, 2514, 2932, 2753, 2862, 2899, 2605, 2989, 3096, 3124, 2985, 2716, 3145, 3017, 2591, 2640, 3033, 1853, 3216, 3316, 3412, 2971, 3256, 3153, 3575, 3339, 2915, 2531, 3552, 3475, 3060, 3375, 2756, 3382, 2847, 2859, 3251, 3702, 3423, 2537, 2801, 3076, 2696, 3092, 3459, 3144, 3441, 2802, 3479, 2907, 3512, 3518, 3021, 2871, 3032, 2647, 2945, 3045, 2763, 3313, 3034, 3315, 3541, 2746, 2669, 2524, 3003, 2732, 3166, 3046, 3306, 2873, 3364, 3253, 3215, 3061, 2804, 2722, 2964, 2990, 2836, 4098, 4449, 3173, 2762, 3737, 2628, 3507, 2564, 3031, 2872, 3360, 2658, 2930, 2904, 3244, 3217, 3311, 3445, 2840, 3372, 2958, 3098, 3356, 3456, 3388, 2624, 3207, 2576, 2742, 2665, 2815, 3052, 3421, 2593, 3242, 2535, 2966, 2898, 2858, 2943, 2668, 2798, 3196, 2528, 2713, 3001, 2691, 2948, 2767, 2544, 3302, 2734, 2893, 2592, 2861, 3502, 2969, 2582, 3229, 2676, 2545, 3255, 3330, 2547, 3257, 2882, 3151, 3088, 2883, 3318, 2645, 2733, 2587, 3500, 3008, 2715, 2845, 3183, 2654, 3233, 3267, 2741, 2827, 2704, 3091, 2832, 2736, 3177, 3271, 2835, 2908, 3176, 2947, 3292, 3191, 2517, 3026, 3082, 3392, 3381, 2584, 2712, 3213, 3451, 2634, 3150, 2810, 3303, 2573, 3460, 2615, 3394, 2828, 3329, 4377, 4499, 3555, 2974, 3782, 3629, 3578, 3885, 2817, 3248, 2954, 3334, 3571, 3345, 3551, 3384, 3422, 1357, 1844, 2530, 2973, 4418, 4081, 3951, 1764, 1671, 1852, 334, 1843, 3449, 3185, 3399, 2786, 3055, 3472, 3397, 2601, 3564, 3277, 4373, 3548, 3179, 3407, 3841, 3347, 3142, 4255, 4431, 3241, 3077, 2700, 3147, 2648, 3283, 2829, 3278, 2581, 2536, 4363, 2848, 3410, 2797, 2523, 2520, 2721, 3496, 2571, 3198, 3219, 3030, 2673, 2921, 3837, 3301, 3322, 2705, 3239, 2949, 3369, 3396, 2892, 2897, 2766, 3174, 3297, 2550, 2889, 2933, 2793, 2627, 2677, 3119, 2596, 3226, 3172, 3089, 2868, 2839, 3942, 3120, 3286, 2843, 3465, 1564, 3946, 4222, 1504, 3999, 2682, 1875, 2865, 3539, 3168, 2864, 3308, 3557, 2940, 3109, 3503, 2625, 3455, 3114, 2595, 3331, 2978, 2518, 2521, 4079, 3024, 3573, 2952, 2653, 1769, 3180, 2813, 2652, 2600, 2816, 3201, 3188, 3270, 2997, 2992, 3009, 3520, 2936, 3275, 3165, 3447, 3131, 3305, 2809, 2792, 2729, 2814, 2619, 3266, 2825, 3066, 2857, 2998, 3064, 2681, 3035, 3279, 2764, 3480, 3127, 2912, 3010, 2607, 3211, 3111, 3041, 1573, 3909, 4269, 3487, 3489, 3019, 335, 1266, 1415, 2980, 3428, 1355, 3454, 2851, 2881, 3232, 3458, 3326, 3353, 2927, 3212, 2950, 3376, 3208, 3062, 3612, 3195, 3385, 2686, 2602, 3569, 3123, 2727, 1622, 2821, 2636, 2750, 2850, 3050, 2925, 3336, 3540, 2689, 3139, 2526, 3361, 3022, 3427, 3107, 3140, 3371, 3276, 2831, 3501, 2924, 3366, 3199, 3101, 3321, 3499, 2917, 2683, 2800, 2812, 3340, 3227, 3148, 3657, 4446, 1746, 1464, 1886, 2666, 3246, 3130, 3560, 3236, 2730, 3572, 1607, 3689, 2968, 1457, 1500, 909, 337, 1184, 3450, 2577, 2567, 2532, 3415, 2934, 2984, 2568, 4147, 4498, 1518, 3728, 3637, 3570, 3429, 4091, 2870, 2995, 4338, 3205, 2880, 3261, 1994, 3968, 4291, 4204, 4071, 4034, 1742, 2037, 352, 2820, 3912, 3287, 1218, 1190, 1959, 1840, 3736, 1283, 3861, 1383, 3644, 3691, 4259, 1749, 1418, 1176, 4216, 1924, 1421, 1387, 3992, 4423, 4253, 1618, 1871, 1256, 3748, 4119, 1297, 1586, 1251, 1299, 1954, 4450, 3990, 4029, 4097, 3890, 3796, 1389, 3711, 4344, 1578, 1476, 4343, 1202, 4413, 4384, 3808, 1647, 1475, 3892, 3674, 1739, 3926, 3595, 1943, 3756, 4405, 3973, 4109, 4159, 3744, 4387, 1960, 4275, 3781, 1535, 1210, 4492, 4365, 4118, 3655, 3886, 4278, 4383, 4485, 1392, 3751, 3931, 3986, 3678, 1249, 4353, 4208, 3710, 4238, 4213, 3969, 4436, 3175, 4128, 2970, 1228, 3534, 3437, 3406, 3641, 3639, 3954, 4335, 3995, 3582, 4475, 3784, 4470, 4010, 3802, 3941, 4427, 4396, 4348, 3587, 3818, 3864, 3956, 3863, 3731, 3814, 4067, 4354, 4350, 4334, 3821, 1932, 3929, 4171, 1258, 3824, 3631, 4465, 4494, 1320, 1398, 3828, 1204, 1223, 1284, 1685, 3773, 4209, 3014, 4462, 4246, 4190, 4312, 4023, 3760, 3753, 1178, 3884, 2783, 4038, 3545, 2916, 3112, 2834, 3880, 3673, 4102, 4399, 4048, 3752, 4207, 1235, 3943, 4355, 4087, 4100, 4327, 4037, 4163, 3918, 4486, 1243, 3933, 4178, 1662, 1643, 4152, 3634, 3617, 4445, 4303, 1370, 3838, 4199, 4284, 1213, 4382, 1399, 1187, 3714, 1828, 4487, 3615, 1842, 1501, 3746, 4018, 4420, 3606, 4121, 3724, 3935, 1941, 4419, 4282, 1955, 1949, 4310, 4488, 1577, 4127, 1288, 1171, 3670, 4052, 3627, 3777, 936, 1371, 3685, 1325, 1940, 380, 4482, 4258, 3812, 1581, 1860, 4124, 4508, 4500, 3652, 3972, 1309, 1630, 1528, 3717, 1217, 3692, 4430, 3764, 4316, 4285, 3645, 3971, 4421, 1172, 4026, 2740, 3125, 3546, 1725, 1206, 3842, 4404, 3690, 3962, 4513, 4340, 4329, 4410, 3703, 4136, 1763, 1487, 3589, 3907, 4153, 2707, 3730, 4426, 4180, 4041, 3923, 4444, 3851, 4429, 4361, 1441, 4394, 4302, 3758, 4510, 3742, 1868, 4077, 1710, 1939, 1335, 1666, 1407, 4187, 1193, 1188, 1196, 1724, 1717, 1200, 1646, 4176, 1232, 1989, 4125, 1741, 1508, 1580, 4060, 4378, 1576, 1212, 1893, 3921, 3585, 1174, 1396, 4061, 4015, 1207, 3698, 3825, 3922, 4021, 4181, 1598, 1916, 1429, 4502, 4231, 1321, 4390, 3693, 3734, 1382, 3684, 1747, 3806, 3896, 3635, 1768, 4025, 3976, 3840, 3963, 4286, 1502, 3836, 4161, 3659, 3743, 4130, 3605, 1385, 1783, 4392, 4328, 1316, 4173, 4265, 1246, 1985, 1629, 1829, 1737, 3826, 1473, 1992, 1883, 1656, 1837, 1914, 1839, 1834, 3984, 4495, 3910, 4160, 3671, 4184, 4132, 4250, 1503, 1237, 1523, 1417, 4063, 1562, 3977, 1971, 1707, 1847, 1792, 3769, 4074, 1534, 4239, 4003, 3915, 1689, 1776, 1599, 1265, 1410, 1823, 1498, 954, 955, 2437, 4139, 1482, 3602, 4434, 3721, 1592, 1825, 1698, 1519, 1352, 4202, 4409, 1977, 1917, 2382, 3675, 1833, 3974, 419, 4309, 4045, 3854, 3682, 2491, 444, 445, 1972, 2688, 4366, 3425, 3231, 3649, 2759, 2724, 3873, 3755, 1216, 3599, 3775, 2754, 2606, 3471, 3234, 2565, 2803, 2562, 2684, 3411, 3405, 2690, 1255, 3694, 446, 3985, 3535, 1306, 4084, 3282, 447, 1353, 2168, 3879, 2698, 1894, 1882, 1817, 1880, 490, 1018, 3917, 3616, 4311, 1800, 4473, 4085, 4401, 1310, 3783, 3765, 1538, 3870, 491, 1948, 3699, 1735, 3792, 4290, 2074, 492, 1019, 2012, 1803, 3642, 497, 1322, 1261, 4027, 3478, 3763, 2959, 1293, 2462, 517, 3197, 1595, 3413, 1675, 1616, 1901, 1796, 1517, 4331, 4332, 4466, 2719, 3803, 4123, 4233, 1824, 3129, 3087, 3505, 4158, 4254, 1449, 2121, 1044, 3720, 4351, 4414, 1673, 3453, 3254, 2501, 1050, 3515, 2219, 1433, 1323, 4301, 1569, 1465, 1437, 1674, 4337, 1285, 4268, 1183, 3726, 3881, 4134, 4347, 4012, 3938, 4066, 4198, 4416, 4164, 3630, 4229, 4292, 4193, 4325, 4375, 4371, 4432, 4215, 1753, 3944, 1409, 4195, 1729, 4223, 1540, 4455, 1068, 1069, 4512, 1723, 1070, 3750, 3633, 4070, 4104, 4162, 4235, 1863, 4346, 1881, 1360, 1551, 3733, 4111, 3993, 4108, 3949, 1287, 1713, 1556, 1736, 1995, 1435, 1424, 1830, 1705, 1861, 1197, 1254, 4120, 1545, 4417, 1469, 1292, 1858, 596, 597, 598, 1453, 2559, 2590, 2738, 4478, 4069, 1809, 1327, 4150, 3260, 3481, 3672, 3625, 2008, 4439, 3852, 3997, 1411, 599, 3847, 4993, 1268, 4050, 3377, 4424, 1496, 4143, 4493, 3492, 1962, 1412, 2324, 605, 1368, 3827, 4103, 606, 607, 1113, 3735, 3390, 1694, 3431, 2838, 3483, 3464, 3848, 2558, 3314, 3086, 3029, 2956, 3517, 2651, 2914, 2680, 2632, 3121, 3100, 3528, 3526, 3084, 4220, 3304, 2846, 1186, 3235, 2903, 3559, 2687, 3409, 3237, 2900, 2999, 3349, 3171, 2752, 3262, 3504, 3047, 4376, 3193, 3430, 2525, 2670, 2911, 3508, 2776, 2697, 3200, 2790, 3323, 2543, 2874, 2614, 3904, 3373, 3054, 2617, 4242, 3621, 2708, 4179, 4398, 3959, 4935, 1269, 3095, 1286, 3624, 4481, 1432, 3511, 2735, 4381, 3295, 1585, 2390, 1568, 4035, 2910, 3391, 2808, 3099, 2913, 3676, 2852, 3284, 2731, 1609, 2375, 2201, 3537, 3994, 1319, 4467, 1802, 1227, 1623, 702, 703, 4031, 4305, 1636, 1393, 2010, 3810, 4452, 3677, 4227, 1277, 1400, 4402, 4157, 4197, 1337, 1253, 1532, 4028, 3989, 2449, 4715, 704, 2050, 1493, 1854, 1902, 1510, 4879, 1841, 4234, 4924, 1154, 1314, 4096, 2023, 3815, 2005, 1964, 3439, 2833, 4287, 4509, 4505, 4267, 3697, 3272, 4112, 2967, 3651, 1991, 1805, 1628, 3705, or 2250.

[0009] In some aspects, X³ of SEQ ID NO: 5014 is K or R. In some aspects, the 581 to 589 region of the VP capsid polypeptide has a sequence of any one of SEQ ID NOs: 4177, 1289, 740, 741, 18, 745, 3477, 1548, 3051, 2982, 2877, 3036, 3426, 3073, 3169, 747, 3362, 2784, 21, 3192, 23, 1638, 748, 1703, 1836, 3660, 29, 750, 1640, 33, 34, 35, 36, 37, 38, 1205, 3795, 753, 4288, 4219, 2770, 2962, 4241, 4107, 2718, 3317, 4391, 4053, 3263, 2553, 3947, 2710, 2608, 3467, 2796, 2961, 2529, 3320, 2674, 2635, 3446, 3053, 3250, 3688, 1182, 1998, 4320, 3351, 2655, 3514, 2779, 3194, 3319, 3224, 3281, 3708, 2807, 3562, 3274, 3374, 3013, 3416, 2981, 3065, 2777, 3469, 2977, 2638, 2972, 3059, 2574, 3380, 4262, 3167, 3368, 2781, 3547, 3386, 1225, 2960, 3485, 3370, 3443, 2824, 3327, 3178, 3006, 3252, 2991, 3470, 2888, 2572, 3418, 2642, 2519, 3363, 40, 2633, 41, 42, 43, 755, 45, 756, 46, 48, 1952, 758, 49, 3122, 2551, 3718, 3484, 3577, 759, 1230, 3960, 1378, 2994, 3080, 2589, 3681, 760, 53, 3925, 55, 3654, 56, 61, 4086, 1740, 1660, 765, 766, 62, 1966, 63, 64, 768, 771, 65, 66, 67, 68, 3816, 2599, 2706, 74, 3865, 1549, 1361, 3882, 3713, 1942, 1312, 4501, 76, 77, 1560, 4289, 3757, 79, 3593, 4043, 1806, 3908, 4397, 1615, 4415, 3723, 2006, 3754, 1470, 4360, 3945, 2854, 3523, 3669, 82, 4065, 83, 1294, 1484, 3891, 4456, 4040, 4496, 1982, 2001, 1478, 1189, 1490, 1885, 1926, 89, 90, 91, 779, 1180, 92, 785, 786, 94, 95, 1831, 1867, 4458, 97, 1970, 1936, 1590, 100, 789, 790, 1298, 101, 1688, 791, 792, 2007, 103, 794, 795, 104, 105, 106, 1849, 108, 1579, 110, 1906, 113, 1444, 1344, 116, 802, 117, 118, 121, 803, 804, 1463, 805, 122, 124, 125, 127, 807, 132, 809, 810, 133, 1978, 812, 135, 136, 137, 138, 813, 140, 815, 1326, 141, 142, 143, 144, 145, 1634, 1302, 817, 146, 818, 147, 148, 149, 151, 152, 153, 154, 155, 819, 820, 157, 159, 160, 163, 164, 165, 166, 822, 167, 168, 169, 170, 171, 823, 824, 1651, 173, 1483, 174, 175, 825, 176, 177, 826, 827, 181, 828, 182, 829, 184, 185, 186, 187, 188, 189, 830, 191, 192, 193, 194, 195, 196, 1391, 197, 200, 201, 202, 203, 204, 205, 832, 833, 206, 834, 836, 1334, 837, 3901, 3312, 2649, 1301, 211, 212, 1450, 4386, 3028, 213, 1446, 214, 215, 1896, 1522, 3490, 838, 217, 218, 219, 1612, 220, 221, 222, 839, 223, 840, 224, 226, 227, 230, 231, 842, 232, 233, 844, 236, 237, 851, 852, 853, 1536, 240, 854, 242, 243, 244, 245, 246, 247, 249, 250, 251, 252, 253, 254, 255, 857, 256, 257, 258, 259, 858, 859, 260, 261, 860, 861, 862, 262, 264, 1241, 265, 266, 866, 1477, 267, 867, 869, 870, 271, 871, 872, 272, 1252, 273, 1591, 275, 1980, 276, 876, 877, 277, 278, 279, 1892, 1539, 880, 1295, 3601, 3877, 1930, 1420, 1678, 1460, 282, 1799, 283, 1626, 1374, 287, 1620, 1290, 1354, 888, 291, 1956, 889, 292, 4324, 293, 4138, 891, 3903, 297, 3829, 3809, 4271, 3844, 1436, 1515, 1617, 1961, 304, 306, 1589, 4370, 308, 309, 894, 3646, 4059, 1431, 1331, 312, 895, 1779, 313, 314, 315, 316, 896, 1558, 1552, 898, 321, 322, 899, 1958, 901, 325, 902, 326, 1491, 329, 330, 905, 4484, 1756, 3536, 2701, 2799, 3332, 3294, 3159, 3069, 2637, 3025, 2782, 3247, 3350, 2692, 2586, 3004, 3049, 2694, 2650, 3554, 2983, 3403, 3214, 3163, 2541, 3090, 3097, 3462, 1430, 2941, 3486, 2842, 3558, 3104, 3037, 3419, 2780, 2931, 1276, 2928, 2609, 3068, 3128, 2548, 2538, 2618, 2789, 3228, 2657, 3189, 2863, 3307, 3300, 2546, 3048, 3543, 2946, 2975, 3346, 3067, 2728, 2955, 3408, 3027, 3094, 3203, 2988, 2751, 2953, 2566, 2578, 2823, 3063, 3335, 3000, 3181, 3011, 3138, 3389, 2805, 3074, 2894, 3149, 2560, 3417, 3265, 3378, 2901, 2837, 2822, 2745, 3473, 3530, 3040, 2597, 3509, 3522, 3161, 2926, 3209, 3105, 3400, 2630, 2905, 2671, 2818, 2806, 2702, 2709, 3549, 3538, 2534, 2773, 2623, 3491, 3243, 3136, 2693, 3164, 3343, 2918, 2555, 2794, 2679, 3510, 3110, 2672, 3442, 2929, 3184, 3488, 3093, 2996, 3141, 3544, 3102, 2856, 2957, 3466, 3461, 2788, 2660, 3344, 3204, 2720, 3379, 2826, 1789, 2785, 3249, 3527, 4460, 3352, 2569, 4457, 2011, 4319, 3906, 1533, 1755, 1888, 4248, 1557, 1404, 4188, 1330, 4349, 3337, 3533, 2629, 3038, 2539, 3567, 3291, 3348, 3115, 3359, 2993, 3079, 3506, 2527, 2963, 2938, 2516, 3113, 1345, 2639, 3143, 3044, 2747, 3154, 3280, 3039, 2743, 2902, 3056, 2554, 2522, 3103, 3210, 3434, 2656, 4251, 4166, 4196, 3206, 3328, 2588, 3553, 2714, 3078, 3222, 3137, 3357, 2717, 2944, 3012, 3220, 3202, 2811, 3083, 3269, 3566, 2699, 2515, 3023, 2533, 3288, 3075, 3005, 2685, 3058, 2976, 2622, 3333, 3463, 2939, 3521, 3268, 3117, 2626, 2616, 3240, 2570, 3565, 2919, 3157, 2849, 3444, 2631, 3420, 2659, 3325, 3186, 2920, 3258, 3440, 3457, 3310, 2761, 3134, 2621, 3531, 2711, 2774, 2867, 2585, 3155, 2620, 3156, 2844, 3126, 3160, 2909, 3542, 3225, 2887, 3474, 3218, 2744, 2896, 3135, 3424, 3498, 3529, 2661, 2667, 2549, 2819, 2768, 2935, 3182, 2772, 3230, 3043, 2922, 3581, 3524, 2869, 2610, 3298, 2775, 3108, 2603, 3614, 2612, 2860, 3187, 3238, 3786, 4385, 3016, 3436, 2876, 2987, 3532, 3438, 3561, 3259, 2663, 2890, 3433, 3071, 3018, 2580, 2755, 3015, 2540, 3398, 2664, 2583, 2830, 2644, 2641, 3513, 2725, 2723, 3338, 3556, 2866, 2514, 2932, 2753, 2862, 2899, 2605, 2989, 3096, 3124, 2985, 2716, 3145, 3017, 2591, 2640, 3033, 1853, 3216, 3316, 3412, 2971, 3256, 3153, 3575, 3339, 2915, 2531, 3552, 3475, 3060, 3375, 2756, 3382, 2847, 2859, 3251, 3702, 3423, 2537, 2801, 3076, 2696, 3092, 3459, 3144, 3441, 2802, 3479, 2907, 3512, 3518, 3021, 2871, 3032, 2647, 2945, 3045, 2763, 3313, 3034, 3315, 3541, 2746, 2669, 2524, 3003, 2732, 3166, 3046, 3306, 2873, 3364, 3253, 3215, 3061, 2804, 2722, 2964, 2990, 2836, 4098, 4449, 3173, 2762, 3737, 2628, 3507, 2564, 3031, 2872, 3360, 2658, 2930, 2904, 3244, 3217, 3311, 3445, 2840, 3372, 2958, 3098, 3356, 3456, 3388, 2624, 3207, 2576, 2742, 2665, 2815, 3052, 3421, 2593, 3242, 2535, 2966, 2898, 2858, 2943, 2668, 2798, 3196, 2528, 2713, 3001, 2691, 2948, 2767, 2544, 3302, 2734, 2893, 2592, 2861, 3502, 2969, 2582, 3229, 2676, 2545, 3255, 3330, 2547, 3257, 2882, 3151, 3088, 2883, 3318, 2645, 2733, 2587, 3500, 3008, 2715, 2845, 3183, 2654, 3233, 3267, 2741, 2827, 2704, 3091, 2832, 2736, 3177, 3271, 2835, 2908, 3176, 2947, 3292, 3191, 2517, 3026, 3082, 3392, 3381, 2584, 2712, 3213, 3451, 2634, 3150, 2810, 3303, 2573, 3460, 2615, 3394, 2828, 3329, 4377, 4499, 3555, 2974, 3782, 3629, 3578, 3885, 2817, 3248, 2954, 3334, 3571, 3345, 3551, 3384, 3422, 1357, 1844, 2530, 2973, 4418, 4081, 3951, 1764, 1671, 1843, 3449, 3185, 3399, 2786, 3055, 3472, 3397, 2601, 3564, 3277, 4373, 3548, 3179, 3407, 3841, 3347, 3142, 4255, 4431, 3241, 3077, 2700, 3147, 2648, 3283, 2829, 3278, 2581, 2536, 4363, 2848, 3410, 2797, 2523, 2520, 2721, 3496, 2571, 3198, 3219, 3030, 2673, 2921, 3837, 3301, 3322, 2705, 3239, 2949, 3369, 3396, 2892, 2897, 2766, 3174, 3297, 2550, 2889, 2933, 2793, 2627, 2677, 3119, 2596, 3226, 3172, 3089, 2868, 2839, 3942, 3120, 3286, 2843, 3465, 1564, 3946, 4222, 1504, 3999, 2682, 1875, 2865, 3539, 3168, 2864, 3308, 3557, 2940, 3109, 3503, 2625, 3455, 3114, 2595, 3331, 2978, 2518, 2521, 4079, 3024, 3573, 2952, 2653, 1769, 3180, 2813, 2652, 2600, 2816, 3201, 3188, 3270, 2997, 2992, 3009, 3520, 2936, 3275, 3165, 3447, 3131, 3305, 2809, 2792, 2729, 2814, 2619, 3266, 2825, 3066, 2857, 2998, 3064, 2681, 3035, 3279, 2764, 3480, 3127, 2912, 3010, 2607, 3211, 3111, 3041, 1573, 3909, 4269, 3487, 3489, 3019, 335, 1266, 3435, 3482, 3020, 2748, 2646, 2787, 2760, 2563, 3085, 3133, 3158, 3170, 2703, 3494, 2552, 3395, 3245, 3404, 2675, 2791, 1911, 908, 1935, 2749, 3341, 3355, 2575, 2942, 2886, 2758, 2594, 3495, 2884, 3516, 3042, 2737, 2923, 3563, 2855, 3476, 2611, 2937, 3383, 3497, 3402, 3162, 2662, 2875, 3223, 2878, 1808, 3285, 2757, 3057, 2951, 3519, 2579, 2853, 3387, 3401, 3493, 3393, 1608, 3365, 2885, 3574, 3081, 3007, 3568, 3152, 3367, 3358, 336, 3468, 3290, 3550, 3132, 2726, 2879, 3190, 3309, 2613, 2765, 3106, 1355, 3454, 2851, 2881, 3232, 3458, 3326, 3353, 2927, 3212, 2950, 3376, 3208, 3062, 3612, 3195, 3385, 2686, 2602, 3569, 3123, 2727, 1622, 2821, 2636, 2750, 2850, 3050, 2925, 3336, 3540, 2689, 3139, 2526, 3361, 3022, 3427, 3107, 3140, 3371, 3276, 2831, 3501, 2924, 3366, 3199, 3101, 3321, 3499, 2917, 2683, 2800, 2812, 3340, 3227, 3148, 3657, 4446, 1746, 1464, 1886, 2666, 3246, 3130, 3560, 3236, 2730, 3572, 1607, 3689, 2968, 1457, 1500, 909, 337, 1184, 3450, 2577, 2567, 2532, 3415, 2934, 2984, 2568, 4147, 3002, 2986, 2979, 2542, 1762, 4472, 1472, 1529, 4057, 1976, 4507, 1583, 338, 911, 1711, 340, 912, 2013, 341, 4440, 917, 344, 918, 919, 921, 922, 347, 351, 923, 924, 4498, 1518, 3728, 3637, 3570, 3429, 4091, 2870, 2995, 4338, 3205, 2880, 3261, 1994, 3968, 4291, 4204, 4071, 4034, 1742, 2820, 3912, 3287, 4145, 354, 925, 1782, 926, 927, 3610, 357, 359, 4224, 1918, 1959, 3736, 1770, 931, 4155, 364, 1279, 365, 1543, 367, 4049, 1633, 1722, 368, 369, 1495, 1566, 370, 1211, 1873, 4142, 1434, 1358, 1191, 3732, 4110, 4039, 4411, 4506, 4270, 4156, 3780, 4036, 4030, 4016, 1550, 3899, 1247, 1855, 1181, 3919, 1639, 3664, 1244, 4140, 3930, 4117, 4189, 4001, 3799, 3643, 3619, 1240, 1686, 1479, 1307, 1575, 4296, 1665, 3871, 4135, 1605, 4408, 3604, 1274, 3741, 1938, 3709, 1727, 3893, 1280, 3622, 1784, 3834, 1752, 1983, 1743, 3979, 4461, 4113, 3817, 4232, 1340, 1489, 4214, 1219, 1486, 1512, 1481, 1516, 3820, 3789, 4252, 4047, 4330, 4082, 4094, 1574, 1248, 4078, 1872, 1426, 3785, 3687, 4318, 4243, 3866, 3704, 4172, 1621, 4315, 1192, 1513, 1856, 3324, 2769, 2678, 1561, 3296, 377, 1395, 4453, 3940, 3778, 4374, 4210, 4009, 4264, 4339, 4368, 1738, 378, 1610, 4194, 4474, 4013, 4266, 1771, 3860, 3832, 1349, 1381, 3663, 1642, 1185, 4356, 3932, 1233, 4212, 3858, 1198, 4192, 3611, 1919, 1819, 3790, 3712, 1969, 4095, 1887, 4468, 1720, 4247, 2002, 1657, 1663, 1336, 3894, 1554, 1494, 1405, 3576, 4314, 3695, 1851, 4362, 1815, 3845, 4511, 3656, 3638, 1406, 1596, 4454, 1443, 1661, 1359, 1734, 3650, 1910, 1648, 3831, 4435, 1208, 1988, 4451, 1993, 1986, 3849, 1718, 4068, 1835, 1425, 1428, 1282, 4380, 1658, 1452, 1687, 4024, 379, 4072, 3791, 4491, 4323, 4014, 1304, 1440, 1511, 1981, 1676, 1547, 4422, 4450, 3990, 4029, 4097, 3890, 3796, 1389, 3711, 4344, 1578, 1476, 4343, 1202, 4413, 4384, 3808, 1647, 1475, 3892, 3674, 1739, 3926, 3595, 1943, 3756, 4405, 3973, 4109, 4159, 3744, 4387, 1960, 4275, 3781, 1535, 1210, 4492, 4365, 4118, 3655, 3886, 4278, 4383, 4485, 1392, 3751, 3931, 3986, 3678, 1249, 4353, 4208, 3710, 4238, 4213, 3969, 4436, 3175, 4128, 2970, 1228, 3534, 3437, 3406, 3641, 3639, 3954, 4335, 3995, 3582, 4475, 3784, 4470, 4010, 3802, 3941, 4427, 4396, 4348, 3587, 3818, 3864, 3956, 3863, 3731, 3814, 4067, 4354, 4350, 4334, 3821, 1932, 3929, 4171, 1258, 3824, 3631, 4465, 4494, 1320, 1398, 3828, 1204, 1223, 1284, 1685, 3773, 4209, 3014, 4462, 4246, 4190, 4312, 4023, 3760, 3753, 1178, 3884, 2783, 4038, 3545, 2916, 3112, 2834, 3880, 3673, 4102, 4399, 4048, 3752, 4207, 1235, 3943, 4355, 4087, 4100, 4327, 4037, 4163, 3918, 4486, 1243, 3933, 4178, 1662, 1643, 4152, 3634, 3617, 4445, 4303, 1370, 3838, 4199, 4284, 1213, 4382, 1399, 1187, 3714, 1828, 4487, 3615, 1842, 1501, 3746, 4018, 4420, 3606, 4121, 3724, 3935, 1941, 4419, 4282, 1955, 1949, 4310, 4488, 1577, 4127, 1288, 1171, 3670, 4052, 1860, 4124, 4508, 4500, 3652, 3972, 1309, 1630, 1528, 3717, 1217, 3692, 4430, 3764, 4316, 4285, 3645, 3971, 4421, 1172, 4026, 2740, 3125, 3546, 1725, 1206, 3842, 4404, 3690, 3962, 4513, 4340, 4329, 4410, 3703, 4136, 1763, 1487, 3589, 3907, 4153, 2707, 3730, 4426, 4180, 4041, 3923, 4444, 3851, 4429, 4361, 1441, 4394, 4302, 3758, 4510, 3742, 1868, 4077, 1710, 1939, 1335, 1997, 1975, 1701, 4280, 1613, 4006, 1984, 1351, 3653, 3833, 1593, 2561, 4442, 3900, 4298, 1761, 4388, 1820, 1597, 4317, 4249, 1341, 1680, 4441, 3628, 3725, 1945, 4206, 1588, 1439, 3794, 4447, 1838, 3776, 3658, 4064, 1377, 4011, 4272, 4503, 1367, 3594, 3680, 1300, 1750, 3913, 3774, 1877, 1987, 1862, 3998, 1380, 4185, 3686, 3696, 4463, 1350, 4008, 4230, 3853, 4244, 4083, 381, 1909, 3897, 1546, 3613, 3273, 3452, 3525, 1229, 4105, 3835, 383, 1234, 3970, 1492, 3856, 3586, 1175, 4321, 4020, 4144, 1224, 1199, 3667, 2778, 4412, 4407, 1812, 1810, 3823, 1416, 1427, 1507, 1878, 4333, 3146, 4281, 4211, 1179, 3843, 1669, 1677, 1524, 1525, 1974, 384, 1979, 1456, 1239, 4167, 3740, 1876, 1388, 1967, 1474, 385, 1342, 1508, 1580, 4060, 4378, 1576, 1212, 1893, 3921, 3585, 1174, 1396, 4061, 4015, 1207, 3698, 3825, 3922, 4021, 4181, 1598, 1916, 1429, 4502, 4231, 1321, 4390, 3693, 3734, 1382, 3684, 1747, 3806, 3896, 3635, 1768, 4025, 3976, 3840, 3963, 4286, 1502, 3836, 4161, 3659, 3743, 4130, 3605, 1385, 1783, 4392, 4328, 1316, 4173, 4265, 1246, 1985, 1629, 1829, 1737, 1837, 1914, 1839, 1834, 3984, 4495, 3910, 4160, 3671, 4184, 4132, 4250, 1503, 1237, 1523, 1417, 4063, 1562, 3977, 1971, 1707, 1847, 1792, 3769, 4074, 1534, 4239, 4003, 3915, 1689, 1776, 1599, 1265, 1655, 3874, 4261, 3626, 1791, 3579, 1644, 3936, 4054, 4260, 4359, 4131, 4297, 4357, 4022, 3770, 4046, 1222, 1996, 3788, 4169, 1925, 3953, 4228, 4226, 4277, 4101, 1889, 1369, 3797, 4088, 4019, 3771, 3632, 1402, 1520, 1767, 1466, 1194, 4137, 1908, 1927, 1758, 3772, 3661, 4186, 4174, 1170, 3850, 1315, 1611, 1530, 3596, 1461, 1848, 1173, 1928, 1459, 1765, 1826, 3719, 1931, 3584, 4004, 3591, 3967, 4168, 3957, 3878, 4165, 4191, 3980, 4058, 4200, 4336, 3958, 1260, 4051, 3798, 4032, 1774, 4322, 3991, 4106, 1641, 1570, 3978, 3965, 4464, 3813, 4154, 1365, 4257, 3846, 4345, 4379, 3603, 1693, 3937, 3801, 1787, 1214, 4483, 4201, 1898, 4245, 1347, 3867, 1900, 3640, 3916, 4089, 1209, 3745, 3988, 3975, 4236, 4075, 4146, 4256, 4308, 4000, 4148, 3588, 3868, 4403, 3883, 4326, 4393, 3895, 4237, 3955, 3727, 4005, 4092, 4372, 4283, 1553, 3805, 4151, 1281, 1681, 4489, 3982, 4437, 3597, 4342, 3872, 3987, 4490, 3876, 3668, 4300, 1679, 1242, 3598, 3583, 3647, 389, 4304, 3793, 3779, 1937, 1907, 4042, 3648, 3996, 3800, 4367, 4099, 1807, 3887, 4428, 1625, 1390, 1884, 1682, 4364, 4306, 3869, 1278, 1672, 942, 1505, 1542, 1709, 1915, 3600, 3914, 1968, 3948, 1670, 3811, 1865, 1362, 1716, 3961, 1506, 4221, 1376, 1683, 4276, 1445, 1721, 1632, 3607, 1328, 1455, 1913, 1497, 1317, 1951, 1778, 1379, 3768, 4225, 1668, 390, 391, 4406, 4341, 1480, 395, 1714, 1422, 396, 397, 3618, 4433, 1177, 3898, 398, 949, 950, 399, 951, 400, 1965, 4471, 952, 402, 2475, 403, 404, 4139, 1482, 3602, 4434, 3721, 1592, 1519, 1352, 4202, 4409, 1977, 1917, 407, 408, 1631, 1684, 409, 3889, 958, 959, 412, 960, 414, 415, 961, 1905, 416, 963, 417, 3675, 1833, 3974, 420, 421, 965, 966, 969, 970, 422, 1897, 423, 4133, 3830, 972, 424, 973, 427, 1708, 4141, 3749, 431, 1619, 975, 4044, 3590, 1944, 4126, 1923, 1706, 4400, 434, 1606, 979, 2604, 2895, 436, 3448, 1692, 983, 3862, 4055, 4358, 984, 985, 1664, 445, 1972, 2688, 4366, 3425, 3231, 3649, 2759, 2724, 3873, 3755, 1216, 3599, 3775, 2754, 2606, 3471, 3234, 2565, 2803, 2562, 2684, 3411, 3405, 2690, 1255, 3694, 3535, 1306, 4084, 3282, 1780, 987, 988, 990, 451, 452, 991, 992, 1728, 994, 995, 454, 1696, 3116, 1869, 456, 1386, 999, 3879, 2698, 1001, 461, 1447, 462, 464, 4425, 1645, 1231, 1468, 472, 473, 476, 1273, 1007, 1744, 1488, 1659, 477, 1604, 481, 4313, 482, 483, 1499, 484, 1016, 4073, 1777, 1458, 4274, 487, 1775, 4205, 1526, 1697, 1017, 2000, 489, 3917, 3616, 4311, 1800, 4473, 4085, 4401, 1310, 3783, 3765, 491, 1948, 3699, 1735, 3792, 4290, 495, 4090, 496, 2012, 1803, 3642, 1322, 498, 1021, 1022, 502, 1333, 503, 1023, 1890, 510, 1026, 3608, 1732, 511, 2397, 1864, 1816, 1531, 3636, 1699, 1027, 1029, 1366, 2112, 1261, 4027, 3478, 3763, 2959, 517, 3197, 1595, 3413, 1448, 518, 1675, 1797, 520, 1999, 3759, 1215, 4122, 1730, 524, 526, 3966, 3911, 529, 3289, 1821, 530, 531, 1874, 1038, 536, 537, 3767, 1929, 1041, 1042, 3683, 542, 1338, 4331, 4332, 4466, 2719, 3803, 4123, 4233, 1824, 3129, 3087, 3505, 4158, 4254, 1449, 3720, 4351, 4414, 1673, 3453, 3254, 1649, 546, 4240, 3580, 1046, 1047, 550, 2598, 551, 552, 3819, 1259, 4062, 2841, 1050, 3515, 4301, 1052, 1053, 3738, 1567, 1270, 3857, 1055, 1257, 1238, 3662, 561, 562, 1058, 4203, 1899, 3981, 1062, 1303, 4116, 567, 1946, 3620, 1514, 4002, 3679, 3964, 3707, 3666, 1348, 4273, 1804, 4497, 1401, 4438, 1895, 1264, 572, 1912, 3939, 4170, 4056, 1271, 1065, 1521, 1221, 1451, 1654, 3934, 4080, 4352, 1700, 3739, 1565, 1419, 1811, 3950, 1690, 1397, 3716, 1437, 1674, 4337, 1285, 4268, 1183, 3726, 3881, 4134, 4347, 4012, 3938, 4066, 4198, 4416, 4164, 3630, 4229, 4292, 4193, 4325, 4375, 4371, 4432, 4215, 1753, 3944, 1409, 4195, 1729, 4223, 1540, 1723, 1070, 3750, 3633, 4070, 4104, 4162, 4235, 1863, 4346, 1881, 1814, 1572, 4443, 3761, 1346, 1587, 1072, 3592, 576, 1891, 4469, 1275, 1950, 1963, 4129, 1296, 1551, 3733, 4111, 3993, 4108, 3949, 1287, 1713, 1736, 1995, 1435, 1424, 1830, 1705, 1861, 1197, 1254, 4120, 1545, 4417, 1469, 1785, 1236, 4293, 3839, 3983, 4395, 1957, 3928, 4295, 3715, 3855, 3609, 1990, 4076, 4175, 3927, 1757, 1650, 4299, 1773, 2004, 1267, 1364, 1462, 1879, 4007, 3729, 3665, 3722, 1691, 1624, 1751, 1394, 3924, 3952, 580, 581, 2003, 1343, 1559, 1250, 1555, 4114, 1818, 1075, 1076, 1077, 1704, 4448, 1078, 1079, 1786, 585, 3354, 1832, 3432, 2891, 2505, 1903, 1081, 1082, 4459, 1083, 1563, 590, 591, 1085, 594, 1453, 2559, 2590, 2738, 4478, 4069, 1809, 1327, 4150, 3260, 3481, 3672, 3625, 2008, 4439, 3852, 3997, 1411, 599, 3847, 1268, 4050, 3377, 4424, 1496, 4143, 4493, 3492, 1962, 600, 601, 4017, 4477, 1794, 4263, 3072, 2009, 1754, 1087, 1088, 3888, 1368, 3827, 4103, 606, 1090, 1571, 1091, 1438, 1092, 1093, 612, 1094, 3701, 4389, 613, 1603, 1332, 1715, 4369, 1652, 1096, 617, 1541, 618, 1921, 1733, 1373, 1870, 619, 4218, 1798, 1100, 1702, 1101, 1667, 1384, 623, 3700, 1788, 1600, 624, 626, 2771, 627, 1339, 3875, 628, 629, 3070, 4860, 2557, 2795, 2906, 3118, 1614, 1947, 4479, 3766, 632, 1104, 1105, 633, 1813, 636, 3706, 1110, 640, 1111, 641, 642, 1694, 3431, 2838, 3483, 3464, 3848, 2558, 3314, 3086, 3029, 2956, 3517, 2651, 2914, 2680, 2632, 3121, 3100, 3528, 3526, 3084, 4220, 3304, 2846, 1186, 3235, 2903, 3559, 2687, 3409, 3237, 2900, 2999, 3349, 3171, 2752, 3262, 3504, 3047, 4376, 3193, 3430, 2525, 2670, 2911, 3508, 2776, 2697, 3200, 2790, 3323, 2543, 2874, 2614, 3904, 3373, 3054, 2617, 4242, 3621, 2708, 4179, 4398, 3959, 3095, 1286, 3624, 4481, 1432, 3511, 2735, 4381, 3295, 1585, 1114, 1766, 3221, 2643, 2739, 3920, 644, 1116, 645, 646, 647, 1801, 4279, 3762, 1637, 1509, 1119, 2965, 2369, 2695, 3293, 650, 651, 1120, 652, 1121, 3264, 655, 658, 659, 4035, 2910, 3391, 2808, 3099, 2913, 3676, 2852, 3284, 2731, 1609, 3994, 1319, 4467, 1802, 1227, 1623, 662, 663, 664, 1124, 1125, 1128, 1129, 668, 669, 1130, 670, 1131, 1527, 1132, 671, 1772, 1135, 672, 1933, 1731, 1793, 675, 676, 3342, 1138, 1139, 677, 679, 1142, 1143, 681, 1145, 682, 685, 3822, 689, 690, 691, 1147, 1601, 3905, 694, 695, 1414, 1150, 1795, 1372, 1695, 1866, 4115, 1719, 698, 1920, 699, 700, 1544, 4305, 1636, 1393, 2010, 3810, 4452, 3677, 4227, 1277, 1400, 4402, 4157, 4197, 1337, 1253, 1532, 4028, 3989, 1493, 1854, 1902, 1510, 4182, 706, 707, 708, 4476, 1245, 714, 1841, 4234, 1314, 4096, 717, 1155, 4217, 1156, 723, 1157, 1627, 725, 1159, 1953, 1160, 1201, 727, 3787, 3747, 730, 1846, 3815, 2005, 1964, 1822, 1262, 4480, 1537, 1291, 1318, 4294, 1582, 734, 3439, 2833, 4287, 4509, 4505, 4267, 3697, 3272, 4112, 2967, 3651, 1628, 3705, 1195, 3859, 1164, 1165, 1166, 1745, 1973, 1168, 3807, 4307, 1454, or 1781.

[0010] In some aspects, X⁴ of SEQ ID NO: 5014 is K or R. In some aspects, the 581 to 589 region of the VP capsid polypeptide has a sequence of any one of SEQ ID NOs: 739, 4177, 1289, 15, 743, 3477, 3051, 2982, 2877, 746, 3036, 3426, 3073, 3169, 3362, 2784, 3192, 1638, 25, 1703, 1836, 3660, 30, 32, 752, 1653, 2770, 2962, 4241, 4107, 2718, 3317, 4391, 4053, 3263, 2553, 3947, 2710, 2608, 3467, 2796, 2961, 2529, 3320, 2674, 2635, 3446, 3053, 3250, 3688, 1182, 3351, 2655, 3514, 2779, 3194, 3319, 3224, 3281, 3708, 2807, 3562, 3274, 3374, 3013, 3416, 2981, 3065, 2777, 3469, 2977, 2638, 2972, 3059, 2574, 3380, 4262, 3167, 3368, 2781, 3547, 3386, 1225, 2960, 3485, 3370, 3443, 2824, 1467, 3327, 3178, 3006, 3252, 2991, 3470, 2888, 2572, 3418, 2642, 2519, 3363, 2633, 757, 1952, 3122, 2551, 3718, 2216, 3484, 3577, 1308, 1230, 3960, 2994, 3080, 2589, 3681, 51, 761, 3925, 3654, 763, 764, 57, 4086, 1740, 767, 772, 2599, 2706, 70, 3865, 1549, 1361, 3882, 1942, 1312, 4501, 1413, 3593, 4043, 1806, 3908, 4397, 1615, 2006, 3945, 2854, 3523, 3669, 1356, 777, 4065, 84, 1484, 778, 87, 3891, 4456, 4040, 4496, 2001, 1478, 1189, 1490, 1885, 2270, 1180, 786, 4458, 1970, 1590, 98, 1298, 101, 1688, 794, 107, 1849, 797, 1579, 111, 112, 113, 1444, 801, 114, 115, 119, 120, 122, 1760, 123, 124, 806, 125, 126, 127, 128, 129, 130, 134, 811, 814, 139, 1326, 144, 816, 1302, 150, 152, 821, 160, 161, 162, 1651, 1483, 179, 180, 183, 185, 187, 1391, 198, 199, 831, 204, 833, 207, 3901, 3312, 2649, 1301, 4386, 3028, 1896, 1522, 3490, 216, 218, 1612, 225, 228, 229, 234, 239, 849, 850, 1536, 241, 246, 248, 855, 249, 252, 253, 261, 4966, 864, 263, 4749, 2296, 1241, 866, 268, 868, 269, 270, 873, 874, 1252, 273, 1591, 274, 1980, 878, 1539, 3601, 3877, 1930, 1420, 1678, 1460, 1799, 1374, 1290, 1354, 290, 2391, 4324, 294, 4138, 3903, 892, 3829, 298, 3844, 1436, 300, 1515, 1617, 1961, 303, 1589, 893, 4370, 3646, 4059, 1331, 1558, 1552, 320, 1958, 1491, 1635, 332, 3536, 2701, 2799, 3332, 3294, 3159, 3069, 2637, 3025, 2782, 3247, 3350, 2692, 2586, 3004, 3049, 2694, 2650, 3554, 2983, 3403, 3214, 3163, 2541, 3090, 3097, 3462, 2941, 3486, 2842, 3558, 3104, 3037, 3419, 2780, 2931, 1276, 2928, 2609, 3068, 3128, 2548, 2538, 2618, 2789, 3228, 2657, 3189, 2863, 3307, 3300, 2546, 3048, 3543, 2946, 2975, 3346, 3067, 2728, 2955, 3408, 3027, 3094, 3203, 2988, 2751, 2953, 2566, 2578, 2823, 3063, 3335, 3000, 3181, 3011, 3138, 3389, 2805, 3074, 2894, 3149, 2560, 3417, 3265, 3378, 2901, 2837, 2822, 2745, 3473, 3530, 3040, 2597, 3509, 3522, 3161, 2926, 3209, 3105, 3400, 2630, 2905, 2671, 2818, 2806, 2702, 2709, 3549, 3538, 2534, 2773, 2623, 3491, 3243, 3136, 2693, 3164, 3343, 2918, 2555, 2794, 2679, 3510, 3110, 2672, 3442, 2929, 3184, 3488, 3414, 3093, 2996, 3141, 3544, 3102, 2856, 2957, 3466, 3461, 2788, 2660, 3344, 3204, 2720, 3379, 2826, 2785, 3249, 3527, 3352, 2569, 4457, 2011, 3906, 1533, 1755, 1888, 4248, 1557, 3804, 1363, 1934, 1602, 3337, 3533, 2629, 3038, 2539, 3567, 3291, 3348, 3115, 3359, 2993, 3079, 3506, 2527, 2963, 2938, 2516, 3113, 1345, 2639, 3143, 3044, 2747, 3154, 3280, 3039, 2743, 2902, 3056, 2554, 2522, 3103, 3210, 3434, 2656, 4251, 4166, 4196, 3206, 3328, 2588, 3553, 2714, 3078, 3222, 3137, 3357, 2717, 2944, 3012, 3220, 3202, 2811, 3083, 3269, 3566, 2699, 2515, 3023, 2533, 3288, 3075, 3005, 2685, 3058, 2976, 2622, 3333, 3463, 2939, 3521, 3268, 3117, 2626, 2616, 3240, 2570, 3565, 2919, 3157, 2849, 3444, 2631, 3420, 2659, 3325, 3186, 2920, 3258, 3440, 3457, 3310, 2761, 3134, 2621, 3531, 2711, 2774, 2867, 2585, 3155, 2620, 3156, 2844, 3126, 3160, 2909, 3542, 3225, 2887, 3474, 3218, 2744, 2896, 3135, 3424, 3498, 3529, 2661, 2667, 2549, 2819, 2768, 2935, 3182, 2772, 3230, 3043, 2922, 3581, 3524, 2869, 2610, 3298, 2775, 3108, 2603, 3614, 2612, 2860, 3187, 3238, 3786, 3016, 3436, 2876, 2987, 3532, 3438, 3561, 3259, 2663, 2890, 3433, 3071, 3018, 2580, 2755, 3015, 2540, 3398, 2664, 2583, 2830, 2644, 2641, 3513, 2725, 2723, 3338, 3556, 2866, 2514, 2932, 2753, 2862, 2899, 2605, 2989, 3096, 3124, 2985, 2716, 3145, 3017, 2591, 2640, 3033, 1853, 3216, 3316, 3412, 2971, 3256, 3153, 3575, 3339, 2915, 2531, 3552, 3475, 3060, 3375, 2756, 3382, 2847, 2859, 3251, 3702, 3423, 2537, 2801, 3076, 2696, 3092, 3459, 3144, 3441, 2802, 3479, 2907, 3512, 3518, 3021, 2871, 3032, 2647, 2945, 3045, 2763, 3313, 3034, 3315, 3541, 2746, 2669, 2524, 3003, 2732, 3166, 3046, 3306, 2873, 3364, 3253, 3215, 3061, 2804, 2722, 2964, 2990, 2836, 4098, 4449, 3173, 2762, 3737, 2628, 3507, 2564, 3031, 2872, 3360, 2658, 2930, 2904, 3244, 3217, 3311, 3445, 2840, 3372, 2958, 3098, 3356, 3456, 3388, 2624, 3207, 2576, 2742, 2665, 2815, 3052, 3421, 2593, 3242, 2535, 2966, 2898, 2858, 2943, 2668, 2798, 3196, 2528, 2713, 3001, 2691, 2948, 2767, 2544, 3302, 2734, 2893, 2592, 2861, 3502, 2969, 2582, 3229, 2676, 2545, 3255, 3330, 2547, 3257, 2882, 3151, 3088, 2883, 3318, 2645, 2733, 2587, 3500, 3008, 2715, 2845, 3183, 2654, 3233, 3267, 2741, 2827, 2704, 3091, 2832, 2736, 3177, 3271, 2835, 2908, 3176, 2947, 3292, 3191, 2517, 3026, 3082, 3392, 3381, 2584, 2712, 3213, 3451, 2634, 3150, 2810, 3303, 2573, 3460, 2615, 3394, 2828, 3329, 4377, 4499, 3555, 2974, 3782, 3629, 3578, 3885, 2817, 3248, 2954, 3334, 3571, 3345, 3551, 3384, 3422, 1357, 1844, 2530, 1852, 3449, 3185, 3399, 2786, 3055, 3472, 3397, 2601, 3564, 3277, 4373, 3548, 3179, 3407, 3841, 3347, 3142, 4255, 4431, 3241, 3077, 2700, 3147, 2648, 3283, 2829, 3278, 2581, 2536, 4363, 2848, 3410, 2797, 2523, 2520, 2721, 3496, 2571, 3198, 3219, 3030, 2673, 2921, 3837, 3301, 3322, 2705, 3239, 2949, 3369, 3396, 2892, 2897, 2766, 3174, 3297, 2550, 2889, 2933, 2793, 2627, 2677, 3119, 2596, 3226, 3172, 3089, 2868, 2839, 3942, 3120, 3286, 2843, 3465, 1564, 3946, 4222, 1504, 3999, 2682, 1875, 3539, 3168, 2864, 3308, 3557, 2940, 3109, 3503, 2625, 3455, 3114, 2595, 3331, 2978, 2518, 2521, 4079, 3024, 3573, 2952, 2653, 1769, 3180, 2813, 2652, 2600, 2816, 3201, 3188, 3270, 2997, 2992, 3009, 3520, 2936, 3275, 3165, 3447, 3131, 3305, 2809, 2792, 2729, 2814, 2619, 3266, 2825, 3066, 2857, 2998, 3064, 2681, 3035, 3279, 2764, 3480, 3127, 2912, 3010, 2607, 3211, 3111, 3041, 1573, 3909, 4269, 3487, 3489, 2980, 3428, 3435, 3482, 3020, 2748, 2646, 2787, 2760, 2563, 3085, 3133, 3158, 3170, 2703, 3494, 2556, 2552, 3395, 3245, 3404, 2675, 2791, 1911, 1935, 2749, 3341, 3355, 2575, 2942, 2886, 2758, 2594, 3495, 2884, 3516, 3042, 2737, 2923, 3563, 2855, 3476, 2611, 2937, 3383, 3497, 3402, 2662, 2875, 3223, 2878, 3285, 2757, 3057, 2951, 3519, 2579, 2853, 3387, 3401, 3493, 3393, 1608, 3365, 2885, 3574, 3081, 3007, 3568, 3152, 3367, 3358, 3468, 3290, 3550, 3132, 2726, 2879, 3190, 3309, 2613, 2765, 3454, 2851, 2881, 3232, 3458, 3326, 3353, 2927, 3212, 2950, 3376, 3208, 3062, 3612, 3195, 3385, 2686, 2602, 3569, 3123, 2727, 2821, 2636, 2750, 2850, 3050, 2925, 3336, 3540, 2689, 3139, 2526, 3361, 3022, 3427, 3107, 3140, 3371, 3276, 2831, 3501, 2924, 3366, 3199, 3101, 3321, 3499, 2917, 2683, 2800, 2812, 3340, 3227, 3148, 3657, 4446, 1746, 2666, 3246, 3130, 3560, 3236, 2730, 3572, 1607, 3689, 2968, 1457, 1500, 1184, 3450, 2577, 2567, 2532, 3415, 2934, 2984, 2568, 4147, 3002, 2986, 910, 2979, 2542, 4472, 1472, 4057, 4507, 1711, 913, 916, 1594, 4440, 343, 918, 345, 348, 350, 1518, 3728, 3637, 3570, 3429, 2870, 2995, 4338, 3205, 2880, 3261, 1994, 3968, 4291, 4204, 4071, 352, 2820, 3912, 3287, 1218, 1190, 4145, 353, 355, 1782, 928, 3610, 358, 4224, 1918, 1959, 1840, 3736, 4155, 1543, 4049, 1633, 1495, 372, 1873, 1726, 1748, 4411, 4506, 4270, 4156, 3780, 4036, 4030, 4016, 1550, 3899, 1247, 1244, 4140, 3930, 4117, 4189, 4001, 3799, 3643, 3619, 4149, 1313, 3709, 1727, 3893, 1280, 3622, 1784, 3834, 1752, 3979, 4461, 4113, 3817, 4232, 3902, 1857, 1904, 1481, 1516, 3820, 3789, 4252, 4047, 4330, 4082, 4094, 3785, 3687, 4318, 4243, 3866, 1621, 4315, 1192, 1513, 1856, 3324, 2769, 2678, 3296, 375, 1395, 1584, 4093, 3940, 3778, 4374, 4210, 4009, 4264, 4368, 1610, 4194, 4474, 4013, 4266, 1759, 1922, 3663, 1642, 1185, 4356, 3932, 1233, 4212, 3858, 1198, 4192, 3790, 3712, 1969, 934, 1790, 1663, 1336, 3894, 1554, 1494, 1405, 3576, 4314, 3695, 3845, 4511, 3656, 1406, 1596, 4504, 1359, 1734, 3650, 1305, 1208, 1988, 4451, 1282, 4380, 1658, 1452, 1687, 3791, 4491, 4323, 4014, 1304, 1440, 4422, 3861, 1383, 3644, 3691, 4259, 1749, 4216, 1924, 1421, 1387, 3992, 4423, 4253, 1618, 1871, 1256, 3748, 1297, 1586, 1251, 1299, 1954, 3655, 3886, 4278, 4383, 4485, 1392, 3751, 3931, 3986, 3678, 1249, 4353, 4208, 3710, 4238, 4213, 3969, 4436, 3175, 4128, 2970, 1228, 3534, 3437, 3406, 3641, 3639, 3954, 4335, 3995, 3582, 4475, 3784, 4470, 4010, 3802, 3941, 4427, 4396, 4348, 3587, 3818, 3864, 3956, 3863, 3731, 3814, 4067, 4354, 3014, 4462, 4246, 4190, 4312, 4023, 3760, 3753, 1178, 3884, 2783, 4038, 3545, 2916, 3112, 2834, 3880, 3673, 4102, 4399, 4048, 3752, 4207, 1235, 3943, 4355, 4087, 4100, 4327, 4037, 4163, 3918, 4486, 1243, 3933, 4178, 3627, 3777, 1371, 3685, 1325, 1940, 4482, 4258, 3812, 1581, 1217, 3692, 4430, 3764, 4316, 4285, 3645, 3971, 4421, 1172, 4026, 2740, 3125, 3546, 1725, 1206, 3842, 4404, 3690, 3962, 4513, 4340, 4329, 4410, 3703, 4153, 2707, 3730, 4426, 4180, 4041, 3923, 4444, 3851, 4429, 4361, 1441, 4394, 4302, 3758, 4510, 3742, 1666, 1407, 4187, 1188, 1724, 1646, 4280, 1613, 4006, 1984, 1351, 3653, 3833, 2561, 4442, 3900, 4298, 1203, 4441, 3628, 3725, 937, 4447, 3776, 3658, 4064, 1324, 1367, 3594, 3680, 1300, 1987, 1862, 3998, 1380, 4185, 3686, 3696, 4463, 1350, 4008, 4230, 3853, 4244, 4083, 1546, 3613, 3273, 3452, 3525, 4105, 3835, 1263, 4020, 4144, 1224, 1199, 3667, 2778, 4412, 4407, 1812, 1810, 3823, 1416, 4333, 3146, 4281, 4211, 1979, 1456, 1239, 4167, 3740, 1876, 1388, 1967, 1474, 1471, 4176, 1232, 1989, 4125, 1741, 3585, 1174, 1396, 4061, 4015, 1207, 3698, 3825, 3922, 4021, 4181, 1598, 1916, 1429, 4502, 4231, 1321, 4390, 3693, 3734, 3635, 1768, 4025, 3976, 3840, 3963, 4286, 1502, 3836, 4161, 3659, 3743, 4130, 3605, 1385, 1783, 4392, 3826, 1473, 1883, 1834, 3984, 4495, 3910, 4160, 3671, 4184, 4132, 4250, 1503, 1237, 1523, 1417, 4063, 1562, 3977, 1971, 1707, 3769, 4074, 1534, 4239, 4003, 3915, 1689, 1776, 1410, 1823, 1498, 1329, 386, 3936, 4054, 4260, 4359, 4131, 4297, 4357, 4022, 3770, 4046, 1222, 3953, 4228, 4226, 4277, 1520, 1767, 1466, 1194, 4137, 1908, 1927, 1758, 3772, 3661, 4186, 4174, 1170, 1859, 4183, 1408, 1403, 941, 4033, 3623, 1826, 3719, 1931, 3584, 4004, 3591, 3967, 4168, 3957, 3878, 4165, 4191, 3980, 4058, 4200, 4336, 4322, 3991, 4106, 1641, 1570, 3978, 4154, 1365, 4257, 3846, 4345, 4379, 3603, 1693, 3937, 3801, 4201, 1898, 1845, 1226, 1220, 3745, 3988, 3975, 4236, 4075, 4146, 4256, 4308, 4000, 4148, 3588, 3868, 4403, 3883, 4326, 4393, 3895, 4237, 3955, 3727, 4005, 4489, 3982, 4437, 3597, 4342, 3872, 3987, 4490, 3876, 3668, 4300, 4042, 3648, 3996, 3800, 4367, 4099, 1807, 3887, 4428, 1884, 1682, 4364, 4306, 3869, 3600, 3914, 1968, 1670, 3811, 1865, 3961, 1506, 4221, 1376, 1379, 3768, 4225, 945, 394, 1714, 1422, 3618, 4433, 1965, 4471, 954, 4139, 1482, 3721, 1825, 1698, 1519, 1352, 4202, 4409, 1977, 1917, 405, 406, 3889, 413, 962, 418, 3675, 3974, 964, 420, 967, 968, 1897, 1272, 4133, 425, 4141, 430, 3749, 4044, 3590, 1944, 4126, 977, 4400, 1606, 980, 2604, 2895, 3448, 4563, 1692, 4055, 4358, 1664, 4309, 4045, 3854, 3682, 2688, 4366, 3425, 3231, 3649, 2759, 2724, 3873, 3755, 1216, 2754, 2606, 3471, 3234, 2565, 2803, 2562, 2684, 3411, 3405, 2690, 1255, 3985, 3535, 1306, 4084, 3282, 447, 1353, 1780, 449, 1485, 453, 1728, 454, 1696, 455, 3116, 1869, 457, 1386, 3879, 2698, 459, 1447, 4425, 1645, 467, 1488, 478, 1604, 1011, 4313, 4073, 4274, 1775, 2000, 2480, 1882, 1817, 1880, 1800, 4473, 3783, 3870, 1948, 3699, 1735, 3792, 4290, 492, 4090, 1019, 1803, 3642, 497, 500, 1333, 1890, 1024, 3608, 1864, 1531, 3636, 1699, 1028, 1366, 1030, 4027, 3478, 3763, 2959, 1293, 517, 3197, 1595, 3413, 2238, 1031, 1448, 1032, 1675, 1797, 3759, 1215, 4122, 3966, 528, 3911, 3289, 1821, 1874, 1037, 536, 1039, 3767, 3683, 540, 541, 1338, 1616, 1901, 1517, 2719, 3803, 4123, 4233, 3129, 3087, 3505, 4158, 1044, 3720, 4351, 4414, 1673, 3453, 3254, 1649, 543, 4240, 3580, 2598, 4062, 2841, 1049, 3515, 1433, 1323, 4301, 1051, 3738, 1270, 3857, 1056, 3662, 1057, 3981, 1063, 568, 570, 3620, 1064, 4002, 3964, 3707, 3666, 1348, 4273, 4497, 1401, 4438, 1895, 1912, 3939, 4170, 4056, 1221, 1654, 1067, 3934, 4080, 4352, 574, 3739, 1565, 3950, 1397, 3716, 1569, 1465, 4268, 1183, 3726, 3881, 4134, 4347, 4012, 3938, 4066, 4198, 4416, 4164, 3630, 4325, 4375, 4371, 4432, 4215, 1753, 3944, 1409, 4195, 4455, 4512, 3750, 3633, 4070, 4104, 4162, 4235, 4346, 1572, 4443, 3761, 1346, 3592, 1891, 4469, 1275, 577, 1963, 4129, 1296, 1360, 3733, 4111, 3993, 4108, 3949, 1556, 1435, 1424, 1830, 1197, 1254, 4120, 1545, 4417, 1469, 1292, 4293, 1827, 3839, 3983, 4395, 4295, 3715, 3855, 3609, 4076, 4175, 3927, 1650, 4299, 1773, 2004, 1267, 1364, 4007, 3729, 3665, 3722, 1712, 1751, 3924, 3952, 1343, 4114, 1704, 4448, 1786, 3354, 586, 3432, 2891, 587, 1903, 2077, 1080, 1563, 2274, 595, 2559, 2590, 2738, 4478, 4069, 1327, 4150, 3260, 3481, 3672, 3625, 2008, 4439, 3852, 3997, 1411, 1268, 4050, 3377, 4424, 1496, 4143, 4493, 3492, 1962, 1412, 4017, 4477, 1794, 4263, 3072, 2199, 3888, 604, 605, 1368, 3827, 4103, 607, 1571, 1438, 3701, 4389, 4897, 1603, 2154, 1715, 4369, 1652, 1733, 4218, 1798, 621, 1667, 1384, 3700, 1788, 1600, 1102, 1423, 2771, 1339, 3070, 2557, 2795, 2906, 3299, 3118, 4779, 2028, 1614, 1947, 630, 4479, 3766, 1106, 634, 1108, 635, 638, 3706, 3735, 3390, 3431, 2838, 3483, 3464, 3848, 2558, 3314, 3086, 3029, 2956, 3517, 2651, 2914, 2680, 2632, 3121, 3100, 3528, 3526, 3084, 4220, 3304, 2846, 3235, 2903, 3559, 2687, 3409, 3237, 2900, 2999, 3349, 3171, 2752, 3262, 3504, 3047, 4376, 3193, 3430, 2525, 2670, 2911, 3508, 2776, 2697, 3200, 2790, 3323, 2543, 2874, 2614, 3904, 3373, 3054, 2617, 4242, 3621, 2708, 4179, 1269, 3095, 1286, 3624, 4481, 3511, 2735, 4381, 3295, 1585, 3221, 2643, 2739, 3920, 1801, 4279, 2502, 1117, 2965, 2695, 3293, 3264, 2076, 657, 2910, 3391, 2808, 3099, 2913, 3676, 2852, 3284, 2731, 1609, 3537, 3994, 1319, 4467, 1802, 1227, 1623, 667, 1133, 1134, 673, 1933, 1731, 1793, 3342, 683, 1146, 687, 3822, 1601, 692, 3905, 1414, 696, 1695, 4115, 701, 1544, 702, 703, 4031, 2010, 3810, 4452, 3677, 4227, 4402, 4157, 4197, 1337, 1253, 1532, 1493, 1854, 1510, 705, 1153, 4476, 1375, 712, 1245, 715, 4234, 1154, 1314, 4096, 720, 1311, 721, 722, 4217, 726, 3815, 2005, 1964, 1262, 4480, 4294, 1582, 3439, 2833, 4287, 4509, 3272, 4112, 2967, 3651, 1991, 1805, 1628, 3705, 1195, 3859, 3807, 4307, 1454, or 1781.

[0011] In some aspects, X⁵ of SEQ ID NO: 5014 is K or R. In some aspects, the 581 to 589 region of the VP capsid polypeptide has a sequence of any one of SEQ ID NOs: 2498, 4177, 742, 16, 17, 18, 745, 3477, 1548, 2982, 3426, 3073, 3169, 747, 3362, 4942, 23, 28, 2038, 3660, 750, 31, 32, 1640, 34, 37, 4925, 1205, 4288, 4053, 3263, 2553, 3947, 2710, 2608, 3467, 2796, 2961, 2529, 3320, 2674, 2635, 3446, 3053, 3688, 4320, 3708, 2807, 3562, 3274, 3374, 3013, 3416, 2981, 3065, 2777, 3469, 2977, 2638, 2972, 3059, 2574, 3380, 4262, 3167, 3368, 1225, 3178, 3006, 3252, 2991, 2642, 2519, 3363, 2633, 42, 755, 44, 756, 46, 1952, 758, 2410, 2551, 3718, 1308, 1230, 3960, 1378, 2589, 3681, 760, 53, 4951, 4591, 762, 3925, 55, 3654, 763, 60, 61, 4086, 1740, 766, 1966, 63, 2041, 64, 769, 770, 2384, 771, 65, 772, 2197, 68, 3816, 69, 2599, 70, 3865, 1549, 3882, 75, 4501, 76, 774, 1413, 776, 3757, 3593, 4043, 4397, 4415, 3754, 1470, 4360, 3945, 2854, 3523, 3669, 1356, 81, 82, 4065, 83, 84, 1294, 87, 3891, 4456, 4040, 1189, 1490, 90, 92, 782, 94, 1831, 1867, 4458, 1936, 100, 792, 2007, 4556, 795, 104, 106, 1849, 2509, 110, 1906, 798, 2359, 2461, 4864, 1344, 116, 120, 121, 803, 1463, 805, 1760, 123, 124, 806, 127, 2085, 130, 132, 809, 1978, 134, 813, 139, 815, 1326, 141, 142, 145, 4816, 1302, 817, 146, 818, 148, 149, 4546, 150, 153, 156, 157, 163, 164, 166, 169, 823, 824, 1483, 175, 177, 178, 179, 826, 827, 182, 183, 829, 184, 185, 190, 191, 192, 2361, 195, 1391, 197, 2223, 201, 202, 4775, 1334, 837, 3901, 3312, 212, 4386, 3028, 213, 1446, 214, 215, 1896, 3490, 217, 219, 223, 225, 2088, 4542, 226, 227, 230, 843, 844, 237, 845, 239, 849, 852, 1536, 854, 244, 245, 248, 855, 251, 253, 255, 257, 858, 860, 262, 863, 4535, 865, 264, 1241, 265, 1477, 267, 867, 1252, 273, 275, 1980, 277, 281, 1892, 879, 1539, 881, 1295, 282, 285, 1626, 2082, 1374, 1620, 4564, 289, 887, 888, 889, 4324, 293, 4138, 296, 3903, 892, 3829, 298, 301, 302, 1589, 4370, 2342, 309, 4059, 310, 1779, 1558, 1552, 317, 320, 898, 321, 2016, 2134, 324, 325, 327, 1635, 4484, 1756, 4609, 332, 4635, 3069, 2637, 3025, 2782, 3247, 3350, 2692, 2586, 3214, 3163, 2541, 3090, 3097, 3462, 3037, 3419, 2780, 2931, 1276, 2789, 3228, 2657, 3189, 2975, 3346, 3067, 2728, 2955, 3408, 3027, 3094, 3203, 2988, 2751, 2953, 2566, 2578, 2901, 2837, 2822, 2745, 3473, 3530, 3040, 2597, 3509, 3522, 3161, 2926, 3209, 3105, 3400, 2630, 2905, 2671, 2818, 2806, 2534, 2773, 2623, 3491, 3243, 3136, 2693, 3164, 2679, 3510, 3110, 2672, 3442, 2929, 3184, 3488, 3102, 3466, 3461, 2788, 2660, 3344, 2720, 3379, 2826, 3249, 3527, 4460, 3352, 4319, 3906, 4248, 3804, 1363, 1404, 4349, 4166, 4196, 3206, 3328, 2588, 3553, 2714, 3078, 3222, 3137, 3357, 2717, 2944, 3012, 3220, 3202, 2811, 3083, 3269, 3566, 2699, 2515, 3023, 2533, 3288, 3075, 3005, 2685, 3058, 2976, 2622, 3333, 3463, 2939, 3521, 3268, 3117, 2626, 2616, 3240, 2570, 3565, 2919, 3157, 2849, 3444, 2631, 3420, 2659, 3325, 3186, 2920, 3258, 3440, 3457, 3310, 2761, 3134, 2621, 3531, 2711, 2774, 2867, 2585, 3155, 2620, 3156, 2844, 3126, 3160, 2909, 3542, 3225, 2887, 3474, 3218, 2744, 2896, 3135, 3424, 3498, 3529, 2661, 2667, 2549, 2819, 2768, 2935, 3182, 3092, 3459, 3144, 3441, 2802, 3479, 2907, 3512, 3518, 3021, 2871, 3032, 2647, 2945, 3045, 2763, 3313, 3034, 3315, 3541, 2746, 2669, 2524, 3003, 2732, 3166, 3046, 3306, 2873, 3364, 3253, 3215, 3061, 2804, 2722, 2964, 2990, 2836, 4098, 4449, 3173, 2762, 3737, 2628, 3507, 2564, 3031, 2872, 3360, 2658, 2930, 2904, 3244, 3217, 3311, 3445, 2840, 3372, 2958, 3098, 3356, 3456, 3388, 2624, 3207, 2576, 2742, 2665, 2815, 3052, 3421, 2593, 3242, 2535, 2966, 2898, 2858, 2943, 2668, 2798, 3196, 2528, 2713, 3001, 2691, 2948, 2767, 2544, 3302, 2734, 2893, 2592, 2861, 3502, 2969, 2582, 3229, 2676, 2545, 3255, 3330, 2547, 3257, 2882, 3151, 3088, 2883, 3318, 2645, 2733, 2587, 3500, 3008, 2715, 2845, 3183, 2654, 3233, 3267, 2741, 2827, 2704, 3091, 2832, 2736, 3177, 3271, 2835, 2908, 3176, 2947, 3292, 3191, 2517, 3026, 3082, 3392, 3782, 3629, 3578, 3885, 4081, 1764, 1852, 4431, 3241, 3077, 2700, 3147, 2648, 3283, 2829, 3278, 2581, 2536, 4363, 2848, 3410, 2797, 2523, 2520, 2721, 3496, 2571, 3198, 3219, 3030, 2673, 2921, 3837, 3301, 3322, 2705, 3239, 2949, 3369, 3396, 2892, 2897, 2766, 3174, 3297, 2550, 2889, 2933, 2793, 2627, 2677, 3119, 2596, 3226, 3172, 3089, 2868, 2839, 3942, 4222, 1504, 3180, 2813, 2652, 2600, 2816, 3201, 3188, 3270, 2997, 2992, 3009, 3520, 2936, 3275, 3165, 3447, 3131, 3305, 2809, 2792, 2729, 2814, 2619, 3266, 2825, 3066, 2857, 2998, 3064, 2681, 3035, 3279, 2764, 3480, 3127, 2912, 3010, 2607, 3211, 3111, 3909, 4269, 3019, 1415, 3020, 2748, 2646, 2787, 2760, 3158, 3170, 2703, 3494, 3404, 2675, 2749, 3341, 3355, 2594, 3495, 2884, 3516, 3042, 2737, 2923, 3563, 2855, 3476, 2611, 2937, 3383, 2875, 3223, 2878, 1808, 2951, 3519, 2579, 2853, 3387, 3401, 3007, 3568, 3152, 3367, 3358, 336, 3290, 3550, 3309, 2613, 2765, 1355, 2881, 3232, 3458, 3326, 3353, 2927, 3212, 2950, 3376, 3208, 3062, 3612, 3195, 3385, 2686, 1622, 3361, 3022, 3427, 3107, 3140, 3371, 3276, 2831, 3501, 2924, 3366, 3199, 3101, 3321, 3499, 2917, 2683, 1464, 3560, 3236, 2730, 3572, 1607, 909, 2577, 2567, 2532, 3415, 2934, 2984, 2568, 3002, 2338, 4472, 1472, 1529, 4507, 1583, 340, 912, 2013, 913, 2277, 1594, 4440, 917, 343, 344, 345, 346, 350, 351, 4498, 3637, 3570, 3429, 4091, 4338, 3205, 2880, 3261, 3968, 4291, 4204, 4034, 2820, 3912, 3287, 1218, 1190, 4145, 354, 3610, 4224, 1840, 3736, 1770, 4155, 932, 363, 1279, 2156, 1722, 368, 1566, 370, 4967, 372, 1211, 2494, 1726, 1748, 1191, 4039, 4411, 4506, 4270, 4156, 3780, 1550, 3899, 1181, 3919, 1639, 3664, 4189, 4001, 3799, 1240, 1686, 1479, 1307, 1575, 4296, 1665, 3871, 1605, 4408, 4149, 3741, 3893, 1280, 1983, 3979, 3817, 1489, 4214, 3902, 1857, 1904, 3820, 3789, 4252, 4330, 4082, 3785, 3687, 4243, 3704, 4172, 4315, 1192, 2769, 2678, 3296, 2343, 4093, 4453, 3940, 3778, 4374, 4339, 4368, 4194, 4474, 4013, 1771, 1759, 3860, 3832, 1381, 4356, 1233, 4212, 3858, 1198, 3611, 1919, 1819, 3790, 1969, 4247, 1790, 3894, 1554, 3576, 4314, 1851, 1850, 4511, 3656, 3638, 1406, 1443, 1661, 4504, 3831, 4435, 1208, 1988, 3849, 1835, 4380, 4024, 4491, 4323, 4014, 1511, 1981, 1676, 1547, 1383, 3644, 3691, 4259, 1176, 4216, 1924, 1387, 4423, 1256, 4119, 1251, 3990, 4029, 4097, 3890, 3796, 4343, 1202, 4413, 4384, 3808, 3892, 3926, 3756, 4405, 4109, 1210, 4492, 3969, 4436, 3175, 4128, 2970, 1228, 3534, 3437, 3784, 4470, 4010, 4334, 3821, 4171, 3824, 3631, 4494, 1320, 1204, 1223, 1284, 1685, 3760, 3753, 1178, 3884, 2783, 4038, 3545, 2916, 3112, 2834, 3880, 3673, 4102, 4100, 4327, 3634, 3617, 4445, 4303, 1370, 3838, 1187, 3615, 3746, 3935, 1941, 4419, 1171, 3670, 3777, 936, 3685, 1325, 1940, 4482, 4258, 3812, 4124, 4508, 4500, 3652, 3972, 1630, 4421, 1172, 4026, 2740, 3125, 3546, 4513, 4340, 1763, 1487, 3589, 3907, 4041, 3851, 4077, 4187, 1193, 1196, 1724, 1717, 1200, 1975, 1613, 4006, 3653, 3833, 1593, 4442, 3900, 4388, 1820, 4317, 4249, 3628, 3794, 4447, 3776, 3658, 1377, 4011, 4272, 3594, 4185, 3686, 3696, 1350, 4230, 3853, 4244, 1909, 3897, 1546, 3273, 3452, 3525, 4105, 3835, 383, 1263, 1492, 3856, 3586, 1175, 4144, 1224, 1199, 3667, 2778, 4412, 1507, 3146, 4281, 1179, 3843, 3740, 1388, 1474, 1342, 1471, 4176, 1741, 1508, 4378, 1212, 4015, 1207, 3698, 3825, 4231, 3806, 3896, 3963, 4286, 3743, 4130, 3605, 4173, 4265, 1246, 1737, 3826, 1473, 1992, 1883, 1656, 3671, 4063, 1847, 4239, 3915, 1265, 1498, 1329, 3874, 4261, 1791, 3579, 4359, 4131, 4297, 4357, 4046, 3788, 4169, 1925, 4228, 4101, 1889, 1369, 4088, 4019, 1194, 3772, 3850, 1315, 1530, 1859, 4183, 1408, 4033, 3623, 1928, 1459, 1765, 4004, 3591, 3967, 4168, 3957, 3878, 3980, 3958, 4051, 3798, 4032, 3991, 4106, 1641, 4464, 3813, 4257, 3846, 4345, 1787, 1214, 4483, 4201, 1220, 3867, 3640, 3916, 1209, 4236, 4075, 4146, 4256, 4308, 4000, 4148, 3588, 3883, 4326, 4092, 4283, 1553, 3805, 4151, 1281, 1681, 4489, 3982, 4437, 3597, 4342, 3987, 3583, 3647, 389, 4304, 3793, 1937, 3996, 3800, 4367, 4099, 1390, 4364, 4306, 1278, 1672, 1542, 1915, 3600, 3948, 3811, 1362, 4276, 1445, 1721, 1632, 3607, 1317, 1778, 1668, 391, 4406, 4341, 1480, 393, 394, 395, 946, 3618, 4433, 1177, 947, 950, 400, 4471, 401, 402, 954, 3602, 4434, 3721, 1825, 4202, 4409, 406, 1631, 1684, 3889, 410, 412, 2352, 1905, 417, 418, 3675, 1833, 3974, 419, 964, 420, 421, 969, 4733, 1272, 971, 423, 3830, 973, 426, 1708, 428, 4141, 3749, 1619, 975, 4044, 3590, 1706, 4400, 979, 2895, 3448, 438, 982, 2433, 983, 442, 3862, 2435, 443, 4309, 4045, 3854, 3682, 444, 445, 4366, 3425, 3231, 3649, 2759, 2724, 3873, 3599, 3775, 3471, 3234, 2565, 2803, 2562, 2684, 3411, 3405, 2690, 3694, 446, 3985, 3535, 4084, 3282, 988, 2107, 990, 451, 452, 453, 992, 993, 1696, 996, 3116, 1386, 999, 458, 3879, 460, 461, 462, 2339, 1003, 4425, 1645, 1004, 466, 2328, 468, 1231, 1468, 2496, 473, 474, 2108, 1273, 1007, 1744, 1659, 478, 1009, 1012, 4313, 482, 1499, 484, 2513, 2205, 4592, 1458, 4274, 2122, 4905, 4205, 2000, 488, 1894, 3917, 3616, 4311, 4085, 4401, 1310, 3783, 1538, 3870, 1948, 3699, 1735, 3792, 2202, 4090, 2378, 2012, 3642, 1020, 2302, 4665, 4781, 500, 1022, 1023, 4686, 505, 507, 508, 509, 1025, 1732, 1816, 3636, 1028, 516, 1366, 4572, 2489, 1261, 4027, 3763, 2959, 1293, 3197, 1448, 1032, 519, 2420, 522, 3759, 1215, 4122, 1730, 524, 526, 3966, 1035, 527, 528, 529, 530, 531, 1036, 532, 533, 536, 537, 3767, 1929, 1041, 3683, 1043, 4906, 542, 1338, 1796, 4331, 4332, 4466, 3803, 3087, 3505, 1449, 1044, 4414, 3453, 3254, 544, 546, 1045, 547, 4240, 3580, 4680, 549, 550, 2598, 551, 3819, 1259, 4062, 554, 1049, 1050, 1433, 555, 1052, 1053, 3738, 3857, 2089, 1056, 2193, 1257, 1238, 3662, 1059, 1060, 4203, 3981, 1303, 4116, 567, 569, 3620, 4002, 3679, 3707, 4497, 4438, 1264, 3939, 4170, 4056, 1271, 1451, 1654, 3934, 4080, 4352, 574, 3739, 1565, 1419, 3950, 3716, 1465, 3726, 3881, 4134, 4347, 4012, 3938, 4066, 4164, 3630, 4229, 4292, 4215, 1729, 4223, 4455, 4512, 3633, 4070, 4104, 4162, 4443, 3761, 1587, 3592, 1891, 4469, 1963, 4129, 1360, 3949, 1861, 4120, 1292, 4293, 3839, 3983, 3928, 4295, 3715, 3855, 3609, 1990, 4007, 3722, 1624, 3924, 3952, 580, 2003, 1343, 582, 4114, 1818, 1704, 4448, 584, 1078, 1786, 585, 1832, 586, 2891, 587, 4936, 1082, 4459, 2113, 590, 2308, 593, 1858, 597, 2738, 4150, 3260, 3481, 4439, 1268, 4050, 3377, 4424, 3492, 1412, 4477, 4263, 3072, 2009, 3888, 3827, 4103, 1438, 609, 610, 611, 3701, 4389, 613, 4369, 617, 1921, 1373, 1870, 4218, 1099, 1702, 4801, 623, 3700, 1788, 625, 4878, 1423, 1339, 3875, 628, 2557, 2906, 2029, 4876, 1103, 631, 4479, 3766, 632, 1104, 1105, 634, 4651, 1108, 1813, 636, 638, 641, 4581, 1112, 2164, 3735, 3390, 2558, 3314, 3086, 3029, 2956, 3517, 2651, 2914, 2680, 2632, 3121, 3100, 3528, 3526, 3084, 4220, 2752, 3262, 3504, 3047, 4376, 3193, 3430, 2525, 2670, 2911, 3508, 2776, 2697, 3200, 2790, 3323, 2543, 2874, 2614, 3904, 3373, 3054, 2617, 4242, 3621, 4398, 1269, 3624, 4481, 1432, 3295, 1568, 1766, 2643, 2739, 4760, 1115, 3920, 644, 645, 646, 4279, 3762, 1637, 1509, 2200, 1117, 4780, 2965, 2695, 650, 651, 653, 654, 655, 658, 4035, 2910, 3391, 2808, 3676, 2852, 3284, 3537, 1319, 4467, 1802, 1227, 660, 4812, 2364, 1124, 1125, 665, 4917, 1127, 1129, 1132, 1133, 2236, 673, 4557, 1136, 1139, 678, 4737, 4531, 679, 680, 1144, 681, 4525, 2415, 685, 2445, 3822, 690, 691, 1601, 4621, 3905, 695, 1149, 696, 2027, 2160, 1795, 1372, 4115, 2194, 1920, 4031, 1393, 1277, 1400, 4402, 4157, 4028, 704, 1902, 1510, 4182, 1153, 4476, 2053, 710, 1375, 715, 4096, 717, 1155, 719, 1311, 722, 4217, 1156, 723, 1157, 1627, 4566, 1158, 724, 725, 1953, 1201, 3787, 3747, 1846, 3815, 1822, 1537, 1318, 4294, 733, 734, 3439, 2833, 4505, 4267, 3697, 4112, 2967, 3651, 1805, 1163, 3859, 2275, 737, 1167, 1745, 3807, or 4307.

[0012] In some aspects, X⁶ of SEQ ID NO: 5014 is K or R. In some aspects, the 581 to 589 region of the VP capsid polypeptide has a sequence of any one of SEQ ID NOs: 738, 4177, 1289, 740, 14, 743, 744, 17, 3477, 1548, 3051, 2982, 2877, 746, 19, 3036, 3426, 3073, 3169, 747, 3362, 2784, 21, 3192, 22, 1638, 748, 24, 749, 27, 1703, 1836, 28, 3660, 29, 750, 1640, 33, 35, 36, 1653, 1205, 3795, 753, 4288, 4219, 2770, 2962, 4241, 4107, 2718, 3317, 4391, 3263, 2553, 3947, 2710, 2608, 3467, 2796, 2961, 2529, 3320, 2674, 2635, 3446, 3053, 3250, 3688, 1998, 4320, 3351, 2655, 3514, 2779, 3194, 3319, 3224, 3281, 3708, 2807, 3562, 3274, 3374, 3013, 3416, 2981, 3065, 2777, 3469, 2977, 2638, 2972, 3059, 2574, 3380, 4262, 3167, 3368, 2781, 3547, 3386, 1225, 2960, 3485, 3370, 3443, 2824, 1467, 3327, 3178, 3006, 3252, 2991, 3470, 2888, 2572, 3418, 2642, 2519, 3363, 40, 2633, 44, 45, 756, 47, 48, 1952, 3122, 2551, 3718, 3484, 3577, 1308, 3960, 1378, 2994, 3080, 2589, 3681, 51, 760, 762, 3925, 3654, 763, 59, 60, 4086, 1740, 1660, 62, 1966, 63, 2438, 768, 66, 67, 68, 3816, 2599, 2706, 72, 73, 74, 3865, 1549, 1361, 3882, 773, 3713, 1942, 1312, 4501, 76, 1413, 775, 1560, 4289, 3757, 3593, 3908, 4397, 4415, 3723, 3754, 4360, 3945, 2854, 3523, 3669, 1356, 4065, 1294, 1484, 85, 86, 3891, 4456, 4040, 4496, 1982, 2001, 1478, 1189, 1490, 1885, 1926, 89, 780, 1180, 92, 781, 782, 783, 786, 94, 95, 788, 1831, 1867, 96, 4458, 97, 1970, 1936, 1590, 98, 99, 789, 790, 1298, 1688, 791, 792, 2007, 102, 103, 104, 105, 107, 108, 1579, 1906, 111, 798, 112, 799, 800, 1444, 801, 114, 115, 1344, 116, 802, 117, 118, 119, 121, 803, 1463, 1760, 806, 126, 128, 807, 129, 131, 808, 133, 1978, 811, 812, 135, 136, 137, 138, 814, 140, 1326, 141, 142, 143, 2344, 816, 1634, 1302, 817, 818, 147, 148, 149, 150, 151, 154, 155, 819, 820, 156, 157, 158, 161, 162, 165, 822, 168, 169, 170, 823, 172, 1651, 173, 1483, 174, 825, 176, 178, 180, 827, 181, 828, 4911, 184, 186, 188, 189, 830, 192, 193, 194, 196, 1391, 198, 199, 200, 201, 202, 203, 205, 832, 206, 834, 207, 208, 209, 210, 835, 836, 1334, 3901, 3312, 2649, 1450, 4386, 3028, 1446, 1522, 3490, 217, 219, 1612, 220, 221, 222, 839, 223, 840, 224, 225, 228, 229, 230, 231, 842, 232, 233, 234, 238, 847, 239, 850, 851, 853, 1536, 240, 241, 242, 243, 244, 245, 247, 250, 251, 254, 255, 857, 256, 258, 259, 859, 260, 861, 862, 864, 263, 2318, 865, 2326, 264, 1241, 266, 1477, 867, 268, 868, 269, 270, 869, 870, 271, 871, 872, 272, 873, 1252, 1591, 875, 274, 275, 276, 876, 877, 277, 278, 280, 1892, 1539, 881, 3601, 3877, 1460, 282, 1799, 284, 1626, 286, 1374, 1620, 1290, 1354, 887, 1956, 889, 292, 4324, 4138, 891, 296, 3903, 297, 3829, 3809, 4271, 3844, 1436, 300, 1617, 1961, 302, 304, 305, 2147, 1589, 4370, 307, 3646, 4059, 1431, 1331, 312, 1779, 313, 896, 1558, 1552, 318, 319, 322, 1958, 323, 324, 901, 1491, 328, 329, 4484, 907, 3536, 2701, 2799, 3332, 3294, 3159, 3069, 2637, 3025, 2782, 3247, 3350, 2692, 2586, 3004, 3049, 2694, 2650, 3554, 2983, 3403, 3214, 3163, 2541, 3090, 3097, 3462, 1430, 2941, 3486, 2842, 3558, 3104, 3037, 3419, 2780, 2931, 1276, 2928, 2609, 3068, 3128, 2548, 2538, 2618, 2789, 3228, 2657, 3189, 2863, 3307, 3300, 2546, 3048, 3543, 2946, 2975, 3346, 3067, 2728, 2955, 3408, 3027, 3094, 3203, 2988, 2751, 2953, 2566, 2578, 2823, 3063, 3335, 3000, 3181, 3011, 3138, 3389, 2805, 3074, 2894, 3149, 2560, 3417, 3265, 3378, 2901, 2837, 2822, 2745, 3473, 3530, 3040, 2597, 3509, 3522, 3161, 2926, 3209, 3105, 3400, 2630, 2905, 2671, 2818, 2806, 2702, 2709, 3549, 3538, 2534, 2773, 2623, 3491, 3243, 3136, 2693, 3164, 3343, 2918, 2555, 2794, 2679, 3510, 3110, 2672, 3442, 2929, 3184, 3488, 3414, 3093, 2996, 3141, 3544, 3102, 2856, 2957, 3466, 3461, 2788, 2660, 3344, 3204, 2720, 3379, 2826, 1789, 2785, 3249, 3527, 4460, 3352, 2569, 4457, 2011, 4319, 3906, 1533, 1755, 4248, 1557, 3804, 1602, 4188, 1330, 4349, 3337, 3533, 2629, 3038, 2539, 3567, 3291, 3348, 3115, 3359, 2993, 3079, 3506, 2527, 2963, 2938, 2516, 3113, 2639, 3143, 3044, 2747, 3154, 3280, 3039, 2743, 2902, 3056, 2554, 2522, 3103, 3210, 3434, 2656, 4251, 2588, 3553, 2714, 3078, 3222, 3137, 3357, 2717, 2944, 3012, 3220, 3202, 2811, 3083, 3269, 3566, 2699, 2515, 3023, 2533, 3288, 3075, 3005, 2685, 3058, 2976, 2622, 3333, 3463, 2939, 3521, 3268, 3117, 2626, 2616, 3240, 2570, 3565, 2919, 3157, 2849, 3444, 2631, 3420, 2659, 3325, 3186, 2920, 3258, 3440, 3457, 3310, 2761, 3134, 2621, 3531, 2711, 2774, 2867, 2585, 3155, 2620, 3156, 2844, 3126, 3160, 2909, 3542, 3225, 2887, 3474, 3218, 2744, 2896, 3135, 3424, 3498, 3529, 2661, 2667, 2549, 2819, 2768, 2935, 3182, 2772, 3230, 3043, 2922, 3581, 2869, 2610, 3298, 2775, 3108, 2603, 2612, 2860, 3187, 3238, 3786, 4385, 3016, 3436, 2876, 2987, 3532, 3438, 3561, 3259, 2663, 2890, 3433, 3071, 3018, 2580, 2755, 3015, 2540, 3398, 2664, 2583, 2830, 2644, 2641, 3513, 2725, 2723, 3338, 3556, 2866, 2514, 2932, 2753, 2862, 2899, 2605, 2989, 3096, 3124, 2985, 2716, 3145, 3017, 2591, 2640, 3033, 3316, 3412, 2971, 3256, 3153, 3575, 3339, 2915, 2531, 3552, 3475, 3060, 3375, 2756, 3382, 2847, 2859, 3251, 3702, 3423, 2537, 2801, 3076, 2696, 3459, 3144, 3441, 2802, 3479, 2907, 3512, 3518, 3021, 2871, 3032, 2647, 2945, 3045, 2763, 3313, 3034, 3315, 3541, 2746, 2669, 2524, 3003, 2732, 3166, 3046, 3306, 2873, 3364, 3253, 3215, 3061, 2804, 2722, 2964, 2990, 2836, 3173, 2762, 3737, 2628, 3507, 2564, 3031, 2872, 3360, 2658, 2930, 2904, 3244, 3217, 3311, 3445, 2840, 3372, 2958, 3098, 3356, 3456, 3388, 2624, 3207, 2576, 2742, 2665, 2815, 3052, 3421, 2593, 3242, 2535, 2966, 2898, 2858, 2943, 2668, 2798, 3196, 2528, 2713, 3001, 2691, 2948, 2767, 2544, 3302, 2734, 2893, 2592, 2861, 3502, 2969, 2582, 3229, 2676, 2545, 3255, 3330, 2547, 3257, 2882, 3151, 3088, 2883, 3318, 2645, 2733, 2587, 3500, 3008, 2715, 2845, 3183, 2654, 3233, 3267, 2741, 2827, 2704, 3091, 2832, 2736, 3177, 3271, 2835, 2908, 3176, 2947, 3292, 3191, 2517, 3026, 3082, 3392, 2584, 2712, 3213, 3451, 2634, 3150, 2810, 3303, 2573, 3460, 2615, 3394, 2828, 3329, 4377, 4499, 3555, 2974, 3629, 3578, 3885, 2817, 3248, 2954, 3334, 3571, 3345, 3551, 3384, 3422, 2530, 2973, 4418, 4081, 3951, 1764, 1671, 1843, 3449, 3185, 3399, 2786, 3055, 3472, 3397, 2601, 3564, 3277, 3548, 3179, 3407, 3841, 3347, 3142, 3241, 3077, 2700, 3147, 2648, 3283, 2829, 3278, 2581, 2536, 4363, 2848, 3410, 2797, 2523, 2520, 2721, 3496, 2571, 3198, 3219, 3030, 2673, 2921, 3301, 3322, 2705, 3239, 2949, 3369, 3396, 2892, 2897, 2766, 3174, 3297, 2550, 2889, 2933, 2793, 2627, 2677, 3119, 2596, 3226, 3172, 3089, 2868, 2839, 3120, 3286, 2843, 3465, 3946, 2682, 2865, 3539, 3168, 2864, 3308, 3557, 2940, 3109, 3503, 2625, 3455, 3114, 2595, 3331, 2978, 2518, 2521, 4079, 3024, 3573, 2952, 2653, 3180, 2813, 2652, 2600, 2816, 3201, 3188, 3270, 2997, 2992, 3009, 3520, 2936, 3275, 3165, 3447, 3131, 3305, 2809, 2792, 2729, 2814, 2619, 3266, 2825, 3066, 2857, 2998, 3064, 2681, 3035, 3279, 2764, 3480, 3127, 2912, 3010, 2607, 3211, 3111, 3041, 4269, 3487, 3489, 3019, 1266, 1415, 2980, 3428, 3435, 3482, 3020, 2748, 2646, 2787, 2760, 2563, 3085, 3133, 3158, 3170, 2703, 3494, 2556, 2552, 3395, 3245, 3404, 2675, 2791, 1911, 908, 1935, 2749, 3341, 3355, 2575, 2942, 2886, 2758, 2594, 3495, 2884, 3516, 3042, 2737, 2923, 3563, 2855, 3476, 2611, 2937, 3383, 3497, 3402, 3162, 2662, 2875, 3223, 2878, 1808, 3285, 2757, 3057, 2951, 3519, 2579, 2853, 3387, 3401, 3493, 3393, 1608, 3365, 2885, 3574, 3081, 3007, 3568, 3152, 3367, 3358, 336, 3468, 3290, 3550, 3132, 2726, 2879, 3190, 3309, 2613, 2765, 3106, 1355, 3454, 2851, 2881, 3232, 3458, 3326, 3353, 2927, 3212, 2950, 3376, 3208, 3062, 3612, 3195, 3385, 2686, 2602, 3569, 3123, 2727, 1622, 2821, 2636, 2750, 2850, 3050, 2925, 3336, 3540, 2689, 3139, 2526, 3361, 3022, 3427, 3107, 3140, 3371, 3276, 2831, 3501, 2924, 3366, 3199, 3101, 3321, 3499, 2917, 2683, 2800, 2812, 3340, 3227, 3148, 3657, 4446, 1464, 1886, 2666, 3246, 3130, 3560, 3236, 2730, 3572, 3689, 2968, 1457, 3450, 2577, 2567, 2532, 3415, 2934, 2984, 2568, 4147, 3002, 2986, 910, 2979, 2542, 1762, 4472, 1529, 4057, 1976, 4507, 1583, 1711, 2013, 1594, 4440, 344, 920, 921, 4498, 3728, 3637, 3570, 3429, 4091, 2870, 2995, 4338, 3205, 2880, 3261, 3968, 4291, 4204, 4071, 4034, 1742, 2820, 3912, 3287, 1218, 1190, 4145, 354, 1782, 927, 3610, 356, 4224, 1918, 1959, 1840, 3736, 1770, 929, 930, 931, 4155, 360, 361, 362, 364, 1279, 365, 1543, 366, 367, 4049, 1633, 1722, 369, 1495, 1566, 373, 1211, 1726, 1442, 1748, 4142, 1434, 1358, 1191, 3732, 4110, 4039, 4506, 4156, 4036, 4030, 4016, 3899, 1247, 1855, 3919, 1244, 4140, 3930, 4117, 4189, 4001, 3643, 3619, 1240, 1575, 3871, 4135, 4408, 3604, 1274, 4149, 3741, 1938, 3709, 3622, 3834, 1983, 1743, 3979, 4461, 4113, 3817, 4232, 4214, 3902, 1219, 1486, 1512, 1516, 4047, 4082, 4094, 1574, 1248, 4078, 1872, 1426, 3687, 4318, 4243, 3866, 3704, 4172, 1856, 3324, 2769, 2678, 1561, 3296, 377, 1395, 1584, 4093, 4453, 4210, 4009, 4264, 4339, 1738, 4474, 4013, 4266, 1771, 1759, 1922, 3860, 3832, 1349, 1381, 3663, 1185, 3932, 3858, 1198, 4192, 3611, 1919, 3790, 3712, 4095, 1887, 4468, 1720, 4247, 934, 1790, 2002, 1657, 1336, 3894, 3576, 4314, 3695, 1850, 4362, 1815, 3638, 4454, 1661, 4504, 1359, 3650, 1305, 1648, 3831, 4435, 4451, 1993, 3849, 1718, 4068, 1835, 1425, 1428, 4380, 1658, 1452, 4024, 4072, 3791, 4491, 4323, 4014, 1304, 1511, 1981, 1676, 4422, 1283, 3861, 3644, 4259, 1418, 1176, 4216, 1421, 3992, 4423, 4253, 3748, 4119, 1297, 1954, 4450, 3711, 4344, 1578, 4384, 3892, 3674, 3595, 4405, 3973, 4109, 4159, 3744, 4387, 4275, 4492, 4365, 4118, 4278, 3751, 3678, 4353, 3175, 2970, 1228, 3534, 3437, 3406, 3641, 4470, 3941, 4348, 3587, 3818, 4350, 3821, 3929, 3824, 4465, 1398, 3828, 1284, 3773, 4209, 3014, 3884, 2783, 4038, 3545, 2916, 3112, 2834, 3880, 4399, 4048, 3752, 4207, 1235, 3943, 4355, 4087, 4100, 4163, 4486, 4178, 1643, 4152, 4445, 4303, 4284, 1213, 4382, 1399, 3714, 4487, 3615, 4018, 4420, 4121, 3724, 4282, 4310, 4488, 4127, 3670, 4052, 3627, 3777, 1371, 3685, 4258, 3812, 1581, 4124, 4508, 4500, 3652, 3972, 1528, 3717, 2740, 3125, 3546, 3842, 4404, 3690, 3962, 4136, 3589, 3907, 4153, 2707, 4180, 3923, 4444, 4361, 4394, 3758, 4510, 3742, 1710, 1407, 4187, 1193, 1188, 1196, 1724, 1717, 1200, 1997, 1701, 4280, 4006, 1984, 3833, 2561, 4442, 3900, 4298, 1761, 4388, 1597, 4317, 4249, 1341, 1203, 1680, 4441, 3628, 3725, 1945, 937, 4206, 1588, 1439, 3794, 4447, 3776, 3658, 4064, 4011, 4272, 4503, 1324, 3594, 3680, 1300, 1750, 3913, 3774, 1877, 1987, 3998, 3686, 3696, 4463, 3853, 4244, 4083, 1909, 3897, 1546, 3613, 3273, 3452, 3525, 1229, 3835, 1234, 3970, 3856, 3586, 1175, 4321, 2778, 4412, 4407, 3823, 1427, 1507, 1878, 4333, 3146, 4281, 4211, 3843, 1677, 1524, 1525, 1974, 1239, 4167, 3740, 1342, 1471, 4176, 1232, 1989, 4125, 1741, 1580, 4060, 1576, 1212, 3921, 1174, 4061, 4021, 3693, 3734, 1382, 3684, 3806, 3635, 3976, 3840, 4286, 3836, 4161, 3659, 3605, 4392, 4328, 1316, 4173, 4265, 1246, 1629, 1829, 3826, 1992, 1656, 1914, 1839, 3984, 3910, 4160, 4184, 4132, 4250, 1792, 3769, 1534, 4003, 1689, 1599, 1265, 1410, 1823, 1498, 1329, 386, 940, 1655, 3874, 4261, 3626, 3579, 1644, 3936, 4054, 4260, 4297, 4357, 4022, 4046, 1222, 1996, 3788, 3953, 4226, 4277, 4101, 3797, 4019, 3771, 3632, 1402, 4137, 3772, 3661, 4186, 4174, 1170, 3850, 1315, 1611, 1859, 4183, 1403, 4033, 3623, 3596, 1461, 1848, 1173, 1928, 1765, 3719, 3584, 4165, 4191, 3980, 4058, 4200, 4336, 3958, 1260, 4051, 3798, 4032, 1774, 4322, 3991, 4106, 3978, 3965, 4464, 3813, 4154, 1365, 3846, 4345, 4379, 3603, 3937, 3801, 1787, 1214, 4483, 4201, 1845, 1220, 4245, 1347, 3867, 1900, 3640, 3916, 4089, 3745, 3975, 4256, 4308, 4000, 3868, 4403, 3883, 4326, 4393, 3895, 4237, 3955, 4005, 4092, 4372, 4283, 3805, 4151, 3982, 3597, 3872, 3987, 4490, 3876, 3668, 4300, 1679, 1242, 3598, 3583, 3647, 4304, 3779, 1907, 4042, 3648, 3996, 3800, 4367, 4099, 1807, 3887, 4428, 1625, 1390, 1884, 1682, 4364, 4306, 3869, 1278, 942, 1505, 1709, 3600, 3914, 3948, 1865, 1716, 3961, 1506, 4221, 1376, 1683, 4276, 1721, 1632, 3607, 1455, 1913, 1497, 1317, 1951, 1778, 3768, 4225, 1668, 390, 4406, 4341, 1480, 1714, 1422, 397, 3618, 4433, 1177, 3898, 398, 950, 400, 1965, 4471, 953, 401, 403, 955, 1482, 3602, 4434, 3721, 1592, 1825, 1698, 1519, 1352, 4409, 1977, 405, 1631, 1684, 409, 3889, 2117, 411, 413, 414, 415, 961, 1905, 416, 963, 3675, 1833, 3974, 965, 970, 1897, 1272, 4133, 3830, 972, 424, 427, 1708, 4141, 3749, 1619, 975, 4044, 3590, 1944, 4126, 1923, 1706, 432, 976, 978, 4400, 1606, 980, 2604, 2895, 436, 3448, 2188, 438, 1692, 442, 3862, 4055, 4358, 2276, 985, 1664, 443, 4309, 4045, 3854, 3682, 1972, 2688, 4366, 3425, 3231, 3649, 2759, 2724, 3755, 1216, 3599, 3775, 2754, 2606, 3471, 3234, 2565, 2803, 2562, 2684, 3411, 3405, 2690, 1255, 3694, 3985, 3535, 1306, 4084, 3282, 1780, 448, 990, 991, 1485, 992, 1728, 993, 994, 1696, 997, 3116, 1869, 456, 1386, 1000, 3879, 2698, 460, 1001, 461, 1447, 1002, 1003, 463, 464, 4425, 465, 1004, 466, 469, 1231, 1468, 470, 1005, 476, 1273, 1744, 1488, 1659, 1604, 479, 1013, 1014, 481, 4313, 1499, 1016, 4073, 1777, 485, 4274, 487, 1775, 4205, 1526, 1697, 2000, 488, 1894, 1882, 1817, 1880, 490, 1018, 3917, 3616, 4311, 4473, 4085, 4401, 3783, 3765, 1538, 3870, 491, 3699, 3792, 4290, 494, 2421, 4090, 2012, 1803, 3642, 1322, 1020, 502, 1333, 504, 1890, 507, 3608, 1732, 1864, 1816, 1531, 513, 3636, 514, 1699, 1027, 1366, 4950, 4027, 3478, 2959, 1293, 3197, 1595, 3413, 518, 1032, 1033, 1675, 1797, 2315, 521, 1999, 3759, 1215, 4122, 1730, 3966, 1035, 4973, 528, 3911, 3289, 1821, 530, 532, 1874, 533, 1038, 538, 539, 3767, 1929, 3683, 1338, 1616, 1901, 1796, 1517, 4331, 4332, 4466, 2719, 4123, 4233, 1824, 3129, 3087, 3505, 4158, 4254, 3720, 4351, 4414, 3453, 3254, 1649, 544, 4240, 3580, 1046, 548, 549, 2598, 552, 553, 3819, 1259, 4062, 554, 2841, 3515, 1433, 1323, 4301, 555, 558, 3738, 1567, 559, 1054, 1270, 3857, 2175, 1257, 1238, 3662, 561, 1058, 563, 1061, 4203, 1899, 3981, 1062, 1303, 4116, 1946, 3620, 1514, 4002, 3679, 3964, 3707, 3666, 1348, 4273, 1804, 4497, 1401, 4438, 1895, 1264, 1912, 573, 3939, 4170, 4056, 1271, 1521, 1221, 1451, 3934, 4080, 4352, 1700, 3739, 1419, 1811, 3950, 1690, 3716, 1569, 1437, 1674, 4337, 1285, 4268, 1183, 3881, 3938, 4198, 4416, 4229, 4292, 4193, 4325, 4375, 4432, 4215, 3944, 4195, 4223, 1540, 4455, 4512, 1723, 3750, 4070, 4104, 4235, 1863, 4346, 1881, 1814, 4443, 3761, 1587, 3592, 576, 4469, 1275, 1950, 4129, 1296, 1551, 3733, 4111, 3993, 4108, 1287, 1713, 1556, 1736, 1995, 1705, 1861, 4120, 4417, 1785, 1236, 4293, 1827, 3839, 3983, 4395, 1957, 3928, 4295, 3715, 3855, 3609, 4076, 4175, 3927, 1757, 4299, 1773, 1364, 1462, 4007, 3729, 3665, 3722, 1691, 1712, 1624, 1751, 1394, 3924, 3952, 581, 2003, 1559, 1250, 1555, 4114, 1818, 1076, 4448, 1078, 1786, 3354, 1832, 3432, 2891, 1903, 4459, 589, 1563, 1084, 591, 592, 594, 595, 1858, 596, 1453, 2559, 2590, 2738, 4478, 4069, 1809, 1327, 4150, 3260, 3481, 3672, 3625, 4439, 3852, 3997, 3847, 4050, 3377, 4424, 4143, 4493, 3492, 1412, 4017, 4477, 1794, 602, 4263, 3072, 2009, 1754, 3888, 603, 604, 1368, 3827, 4103, 1571, 1438, 611, 1093, 612, 1094, 3701, 4389, 614, 615, 1332, 1715, 4369, 1652, 1541, 1921, 1733, 1373, 1870, 619, 4218, 1798, 1702, 1384, 3700, 1788, 1600, 624, 2473, 1423, 2771, 1339, 3875, 3070, 2015, 2557, 2795, 2906, 2103, 3299, 3118, 4576, 1103, 1614, 1947, 631, 4479, 3766, 1107, 635, 1813, 636, 2431, 637, 1109, 639, 3706, 1110, 640, 642, 3735, 3390, 1694, 3431, 2838, 3483, 3464, 3848, 2558, 3314, 3086, 3029, 2956, 3517, 2651, 2914, 2680, 2632, 3121, 3100, 3528, 3526, 3084, 4220, 3304, 2846, 1186, 3235, 2903, 3559, 2687, 3409, 3237, 2900, 2999, 3349, 3171, 2752, 3262, 3504, 3047, 3193, 3430, 2525, 2670, 2911, 3508, 2776, 2697, 3200, 2790, 3323, 2543, 2874, 2614, 3904, 3373, 3054, 2617, 4242, 3621, 2708, 4179, 4398, 3959, 1269, 3095, 1286, 3624, 4481, 3511, 2735, 4381, 3295, 1568, 1766, 3221, 2643, 2739, 3920, 647, 1801, 4279, 3762, 1637, 1509, 648, 1117, 1119, 2965, 2695, 3293, 4722, 1121, 653, 1122, 3264, 655, 656, 657, 4035, 2910, 3391, 2808, 3099, 2913, 3676, 2852, 3284, 2731, 3537, 3994, 1319, 4467, 1623, 660, 1123, 664, 1126, 1128, 1129, 1130, 670, 1527, 671, 1772, 1137, 5005, 1933, 1731, 1793, 3342, 1140, 1141, 687, 3822, 1601, 1148, 693, 3905, 694, 1414, 1149, 697, 1795, 1372, 1695, 1866, 1151, 4115, 1719, 1920, 4999, 1544, 703, 4031, 4305, 1636, 3810, 4452, 3677, 4227, 4402, 4157, 4197, 1337, 1253, 4028, 3989, 704, 1493, 1902, 1152, 4182, 707, 708, 709, 4476, 1375, 713, 714, 1841, 4234, 1154, 1314, 4096, 718, 719, 720, 2063, 1311, 721, 4217, 1627, 1158, 1953, 1201, 3787, 729, 3747, 730, 1846, 3815, 1964, 1822, 1262, 4480, 1537, 1291, 1318, 4294, 1582, 3439, 2833, 4287, 4509, 4505, 4267, 3697, 3272, 4112, 2967, 3651, 1805, 3705, 1195, 3859, 1164, 1165, 2351, 2423, 1745, 1973, 3807, 4307, 1169, 1454, or 1781.

[0013] In some aspects, X⁷ of SEQ ID NO: 5014 is R. In some aspects, the 581 to 589 region of the VP capsid polypeptide has a sequence of any one of SEQ ID NOs: 740, 15, 742, 743, 17, 22, 24, 1836, 32, 36, 2450, 39, 752, 753, 1998, 3059, 2519, 757, 48, 1952, 50, 52, 760, 2389, 54, 2346, 58, 4086, 1660, 1966, 768, 2402, 772, 71, 72, 2453, 3882, 775, 1806, 3669, 1356, 2132, 81, 84, 85, 87, 4040, 88, 1885, 782, 783, 784, 785, 94, 788, 2173, 98, 2007, 102, 113, 799, 4848, 1444, 4821, 2329, 115, 119, 2290, 123, 806, 128, 134, 812, 145, 817, 154, 2149, 821, 167, 171, 4596, 183, 830, 191, 194, 2071, 195, 4920, 831, 2223, 207, 3901, 211, 212, 213, 215, 224, 4782, 845, 846, 849, 850, 854, 247, 248, 2245, 255, 261, 264, 265, 1477, 270, 874, 876, 279, 882, 1930, 285, 286, 886, 2119, 2468, 887, 888, 4138, 297, 3844, 302, 893, 307, 308, 2155, 1431, 2312, 900, 1635, 906, 2799, 2128, 2918, 1363, 4251, 2622, 3333, 3474, 3614, 2732, 3166, 3151, 3088, 2883, 3318, 2645, 2733, 3213, 3782, 1844, 2523, 2520, 2997, 2681, 3035, 3279, 2764, 3480, 2787, 1808, 3101, 3689, 4147, 1762, 1976, 340, 1594, 2439, 348, 4498, 1518, 1782, 926, 357, 359, 932, 363, 369, 1873, 3780, 4140, 4001, 3709, 3834, 1752, 4113, 3817, 4232, 1340, 1489, 4214, 3902, 3820, 4330, 1872, 3687, 4318, 375, 4210, 3860, 4212, 3695, 1851, 4504, 1910, 1428, 4323, 4422, 4259, 1176, 3711, 4365, 4383, 3969, 4128, 3802, 3863, 3821, 4171, 3824, 4462, 3760, 3753, 2783, 3880, 3943, 4163, 4178, 4199, 3724, 3670, 4482, 3692, 4430, 4316, 3645, 3690, 3589, 3730, 4426, 3851, 4429, 1335, 1717, 1997, 1975, 4280, 4006, 3900, 4298, 4388, 1341, 1350, 1909, 4412, 4407, 4281, 4167, 1893, 3585, 4015, 1747, 4286, 3826, 1473, 1914, 3984, 4495, 4184, 3977, 1707, 4074, 4003, 3915, 1410, 1498, 940, 4131, 4357, 1925, 1466, 1611, 1530, 4168, 4245, 4075, 3987, 1679, 4306, 3869, 3768, 393, 2265, 3618, 4433, 947, 399, 401, 402, 4139, 1352, 406, 415, 418, 420, 4919, 431, 4044, 976, 433, 434, 435, 442, 3873, 3411, 3985, 987, 1485, 2262, 457, 458, 4425, 466, 467, 468, 1468, 474, 1008, 1012, 1016, 4518, 1697, 490, 3616, 2247, 2302, 499, 500, 501, 509, 2110, 512, 1797, 520, 525, 3966, 1038, 537, 1041, 3683, 2165, 542, 4331, 3129, 1044, 4351, 3453, 1047, 1323, 4301, 557, 3738, 559, 1270, 3857, 1056, 2186, 1057, 1059, 565, 566, 3981, 567, 3620, 4002, 3666, 3939, 1221, 1397, 1437, 4337, 4268, 3938, 4292, 4215, 3750, 3633, 4070, 3592, 1827, 3839, 4395, 3855, 3665, 1624, 2395, 1818, 586, 587, 1903, 1080, 1081, 1082, 589, 1084, 1085, 594, 596, 4439, 3997, 1962, 1087, 4777, 606, 607, 610, 1094, 4389, 1603, 1095, 616, 618, 622, 1104, 4536, 3706, 2481, 3100, 3200, 3621, 4179, 1432, 4381, 643, 1115, 644, 2307, 2477, 652, 657, 658, 3994, 4467, 661, 663, 665, 4600, 1137, 1933, 4840, 1140, 678, 680, 683, 686, 692, 693, 696, 2081, 2280, 698, 1400, 4197, 1532, 1854, 706, 711, 712, 4570, 714, 1841, 1314, 4096, 2249, 726, 1846, 2385, 1318, 733, 3651, 1165, 4839, 4968, 4684, or 1454.

[0014] In some aspects, (a) X³ of SEQ ID NO: 5014 is a basic amino acid residue, (b) X⁶ of SEQ ID NO: 5014 is a basic amino acid residue, or (c) X³ of SEQ ID NO: 5014 is a basic amino acid residue and X⁶ of SEQ ID NO: 5014 is a basic amino acid residue. In some aspects, the 581 to 589 region of the VP capsid polypeptide has a sequence of any one of SEQ ID NOs: 739, 4177, 1289, 740, 741, 18, 745, 3477, 1548, 3051, 2982, 2877, 3036, 3426, 3073, 3169, 747, 3362, 2784, 21, 3192, 23, 1638, 748, 1703, 1836, 3660, 29, 750, 1640, 33, 34, 35, 36, 37, 38, 1205, 3795, 753, 4288, 4219, 2770, 2962, 4241, 4107, 2718, 3317, 4391, 4053, 3263, 2553, 3947, 2710, 2608, 3467, 2796, 2961, 2529, 3320, 2674, 2635, 3446, 3053, 3250, 3688, 1182, 1998, 4320, 3351, 2655, 3514, 2779, 3194, 3319, 3224, 3281, 3708, 2807, 3562, 3274, 3374, 3013, 3416, 2981, 3065, 2777, 3469, 2977, 2638, 2972, 3059, 2574, 3380, 4262, 3167, 3368, 2781, 3547, 3386, 1225, 2960, 3485, 3370, 3443, 2824, 3327, 3178, 3006, 3252, 2991, 3470, 2888, 2572, 3418, 2642, 2519, 3363, 40, 2633, 41, 42, 43, 755, 45, 756, 46, 48, 1952, 758, 49, 3122, 2551, 3718, 3484, 3577, 759, 1230, 3960, 1378, 2994, 3080, 2589, 3681, 52, 760, 53, 762, 4659, 54, 3925, 55, 3654, 56, 60, 61, 4086, 1740, 1660, 765, 766, 62, 1966, 63, 64, 768, 771, 65, 66, 67, 68, 3816, 2599, 2706, 2399, 74, 3865, 1549, 1361, 2453, 3882, 3713, 1942, 75, 1312, 4501, 76, 77, 78, 1560, 4289, 3757, 79, 3593, 4043, 1806, 3908, 4397, 1615, 4415, 3723, 2006, 3754, 1470, 4360, 3945, 2854, 3523, 3669, 82, 4065, 83, 1294, 1484, 3891, 4456, 4040, 4496, 1982, 2001, 1478, 1189, 88, 1490, 1885, 1926, 89, 90, 91, 779, 1180, 92, 785, 786, 94, 95, 1831, 1867, 4458, 97, 1970, 1936, 1590, 99, 100, 789, 790, 1298, 101, 1688, 791, 792, 2007, 103, 794, 795, 104, 105, 106, 1849, 108, 4736, 1579, 110, 1906, 113, 1444, 1344, 116, 802, 117, 118, 2158, 121, 803, 804, 1463, 805, 122, 2058, 124, 125, 127, 4994, 807, 132, 809, 810, 133, 1978, 812, 135, 136, 137, 138, 813, 4673, 140, 815, 1326, 141, 142, 143, 144, 145, 4816, 1634, 1302, 817, 146, 818, 147, 148, 149, 151, 152, 153, 154, 155, 819, 820, 157, 821, 159, 160, 163, 164, 165, 166, 822, 167, 168, 169, 170, 171, 823, 824, 1651, 173, 1483, 174, 175, 825, 176, 177, 180, 826, 827, 181, 828, 182, 183, 4641, 829, 184, 185, 186, 187, 188, 189, 830, 191, 192, 193, 194, 195, 196, 1391, 197, 2223, 200, 201, 202, 203, 204, 205, 832, 833, 206, 834, 835, 836, 1334, 837, 3901, 3312, 2649, 1301, 211, 212, 1450, 4386, 3028, 213, 1446, 214, 215, 1896, 1522, 3490, 838, 2241, 217, 218, 219, 1612, 220, 221, 222, 839, 223, 840, 224, 226, 227, 230, 231, 842, 232, 233, 235, 844, 236, 237, 2150, 851, 852, 853, 1536, 240, 854, 242, 243, 244, 245, 246, 247, 855, 4634, 249, 250, 251, 252, 253, 254, 255, 857, 256, 257, 258, 259, 858, 859, 260, 261, 860, 861, 862, 262, 2326, 264, 1241, 265, 266, 866, 1477, 267, 867, 869, 870, 271, 871, 872, 272, 874, 1252, 273, 1591, 275, 1980, 276, 876, 877, 277, 278, 279, 1892, 879, 1539, 880, 1295, 3601, 3877, 1930, 1420, 1678, 1460, 2306, 282, 1799, 283, 1626, 1374, 287, 1620, 1290, 1354, 888, 291, 1956, 889, 292, 4324, 293, 4138, 891, 2224, 3903, 297, 3829, 3809, 4271, 3844, 1436, 1515, 1617, 1961, 304, 306, 1589, 4370, 308, 309, 894, 3646, 4059, 1431, 1331, 4948, 312, 895, 1779, 313, 314, 315, 316, 896, 1558, 1552, 897, 898, 321, 322, 899, 1958, 2134, 324, 901, 325, 902, 326, 1491, 329, 330, 905, 4484, 1756, 3536, 2701, 2799, 3332, 3294, 3159, 3069, 2637, 3025, 2782, 3247, 3350, 2692, 2586, 3004, 3049, 2694, 2650, 3554, 2983, 3403, 3214, 3163, 2541, 3090, 3097, 3462, 1430, 2941, 3486, 2842, 3558, 3104, 3037, 3419, 2780, 2931, 1276, 2928, 2609, 3068, 3128, 2548, 2538, 2618, 2789, 3228, 2657, 3189, 2863, 3307, 3300, 2546, 3048, 3543, 2946, 2975, 3346, 3067, 2728, 2955, 3408, 3027, 3094, 3203, 2988, 2751, 2953, 2566, 2578, 2823, 3063, 3335, 3000, 3181, 3011, 3138, 3389, 2805, 3074, 2894, 3149, 2560, 3417, 3265, 3378, 2901, 2837, 2822, 2745, 3473, 3530, 3040, 2597, 3509, 3522, 3161, 2926, 3209, 3105, 3400, 2630, 2905, 2671, 2818, 2806, 2702, 2709, 3549, 3538, 2534, 2773, 2623, 3491, 3243, 3136, 2693, 3164, 3343, 2918, 2555, 2794, 2679, 3510, 3110, 2672, 3442, 2929, 3184, 3488, 3093, 2996, 3141, 3544, 3102, 2856, 2957, 3466, 3461, 2788, 2660, 3344, 3204, 2720, 3379, 2826, 1789, 2785, 3249, 3527, 4460, 3352, 2569, 4457, 2011, 4319, 3906, 1533, 1755, 1888, 4248, 1557, 1363, 1934, 1602, 1404, 4188, 1330, 4349, 3337, 3533, 2629, 3038, 2539, 3567, 3291, 3348, 3115, 3359, 2993, 3079, 3506, 2527, 2963, 2938, 2516, 3113, 1345, 2639, 3143, 3044, 2747, 3154, 3280, 3039, 2743, 2902, 3056, 2554, 2522, 3103, 3210, 3434, 2656, 4251, 4166, 4196, 3206, 3328, 2588, 3553, 2714, 3078, 3222, 3137, 3357, 2717, 2944, 3012, 3220, 3202, 2811, 3083, 3269, 3566, 2699, 2515, 3023, 2533, 3288, 3075, 3005, 2685, 3058, 2976, 2622, 3333, 3463, 2939, 3521, 3268, 3117, 2626, 2616, 3240, 2570, 3565, 2919, 3157, 2849, 3444, 2631, 3420, 2659, 3325, 3186, 2920, 3258, 3440, 3457, 3310, 2761, 3134, 2621, 3531, 2711, 2774, 2867, 2585, 3155, 2620, 3156, 2844, 3126, 3160, 2909, 3542, 3225, 2887, 3474, 3218, 2744, 2896, 3135, 3424, 3498, 3529, 2661, 2667, 2549, 2819, 2768, 2935, 3182, 2772, 3230, 3043, 2922, 3581, 3524, 2869, 2610, 3298, 2775, 3108, 2603, 3614, 2612, 2860, 3187, 3238, 3786, 4385, 3016, 3436, 2876, 2987, 3532, 3438, 3561, 3259, 2663, 2890, 3433, 3071, 3018, 2580, 2755, 3015, 2540, 3398, 2664, 2583, 2830, 2644, 2641, 3513, 2725, 2723, 3338, 3556, 2866, 2514, 2932, 2753, 2862, 2899, 2605, 2989, 3096, 3124, 2985, 2716, 3145, 3017, 2591, 2640, 3033, 1853, 3216, 3316, 3412, 2971, 3256, 3153, 3575, 3339, 2915, 2531, 3552, 3475, 3060, 3375, 2756, 3382, 2847, 2859, 3251, 3702, 3423, 2537, 2801, 3076, 2696, 3092, 3459, 3144, 3441, 2802, 3479, 2907, 3512, 3518, 3021, 2871, 3032, 2647, 2945, 3045, 2763, 3313, 3034, 3315, 3541, 2746, 2669, 2524, 3003, 2732, 3166, 3046, 3306, 2873, 3364, 3253, 3215, 3061, 2804, 2722, 2964, 2990, 2836, 4098, 4449, 3173, 2762, 3737, 2628, 3507, 2564, 3031, 2872, 3360, 2658, 2930, 2904, 3244, 3217, 3311, 3445, 2840, 3372, 2958, 3098, 3356, 3456, 3388, 2624, 3207, 2576, 2742, 2665, 2815, 3052, 3421, 2593, 3242, 2535, 2966, 2898, 2858, 2943, 2668, 2798, 3196, 2528, 2713, 3001, 2691, 2948, 2767, 2544, 3302, 2734, 2893, 2592, 2861, 3502, 2969, 2582, 3229, 2676, 2545, 3255, 3330, 2547, 3257, 2882, 3151, 3088, 2883, 3318, 2645, 2733, 2587, 3500, 3008, 2715, 2845, 3183, 2654, 3233, 3267, 2741, 2827, 2704, 3091, 2832, 2736, 3177, 3271, 2835, 2908, 3176, 2947, 3292, 3191, 2517, 3026, 3082, 3392, 3381, 2584, 2712, 3213, 3451, 2634, 3150, 2810, 3303, 2573, 3460, 2615, 3394, 2828, 3329, 4377, 4499, 3555, 2974, 3782, 3629, 3578, 3885, 2817, 3248, 2954, 3334, 3571, 3345, 3551, 3384, 3422, 1357, 1844, 2530, 2973, 4418, 4081, 3951, 1764, 1671, 1843, 3449, 3185, 3399, 2786, 3055, 3472, 3397, 2601, 3564, 3277, 4373, 3548, 3179, 3407, 3841, 3347, 3142, 4255, 4431, 3241, 3077, 2700, 3147, 2648, 3283, 2829, 3278, 2581, 2536, 4363, 2848, 3410, 2797, 2523, 2520, 2721, 3496, 2571, 3198, 3219, 3030, 2673, 2921, 3837, 3301, 3322, 2705, 3239, 2949, 3369, 3396, 2892, 2897, 2766, 3174, 3297, 2550, 2889, 2933, 2793, 2627, 2677, 3119, 2596, 3226, 3172, 3089, 2868, 2839, 3942, 3120, 3286, 2843, 3465, 1564, 3946, 4222, 1504, 3999, 2682, 1875, 2865, 3539, 3168, 2864, 3308, 3557, 2940, 3109, 3503, 2625, 3455, 3114, 2595, 3331, 2978, 2518, 2521, 4079, 3024, 3573, 2952, 2653, 1769, 3180, 2813, 2652, 2600, 2816, 3201, 3188, 3270, 2997, 2992, 3009, 3520, 2936, 3275, 3165, 3447, 3131, 3305, 2809, 2792, 2729, 2814, 2619, 3266, 2825, 3066, 2857, 2998, 3064, 2681, 3035, 3279, 2764, 3480, 3127, 2912, 3010, 2607, 3211, 3111, 3041, 1573, 3909, 4269, 3487, 3489, 3019, 335, 1266, 3435, 3482, 3020, 2748, 2646, 2787, 2760, 2563, 3085, 3133, 3158, 3170, 2703, 3494, 2552, 3395, 3245, 3404, 2675, 2791, 1911, 908, 1935, 2749, 3341, 3355, 2575, 2942, 2886, 2758, 2594, 3495, 2884, 3516, 3042, 2737, 2923, 3563, 2855, 3476, 2611, 2937, 3383, 3497, 3402, 3162, 2662, 2875, 3223, 2878, 1808, 3285, 2757, 3057, 2951, 3519, 2579, 2853, 3387, 3401, 3493, 3393, 1608, 3365, 2885, 3574, 3081, 3007, 3568, 3152, 3367, 3358, 336, 3468, 3290, 3550, 3132, 2726, 2879, 3190, 3309, 2613, 2765, 3106, 1355, 3454, 2851, 2881, 3232, 3458, 3326, 3353, 2927, 3212, 2950, 3376, 3208, 3062, 3612, 3195, 3385, 2686, 2602, 3569, 3123, 2727, 1622, 2821, 2636, 2750, 2850, 3050, 2925, 3336, 3540, 2689, 3139, 2526, 3361, 3022, 3427, 3107, 3140, 3371, 3276, 2831, 3501, 2924, 3366, 3199, 3101, 3321, 3499, 2917, 2683, 2800, 2812, 3340, 3227, 3148, 3657, 4446, 1746, 1464, 1886, 2666, 3246, 3130, 3560, 3236, 2730, 3572, 1607, 3689, 2968, 1457, 1500, 909, 337, 1184, 3450, 2577, 2567, 2532, 3415, 2934, 2984, 2568, 4147, 3002, 2986, 2979, 2542, 2492, 1762, 4472, 1472, 1529, 4057, 1976, 4507, 1583, 338, 911, 1711, 340, 912, 2013, 341, 1594, 4440, 917, 344, 918, 919, 921, 922, 347, 349, 351, 923, 924, 4498, 1518, 3728, 3637, 3570, 3429, 4091, 2870, 2995, 4338, 3205, 2880, 3261, 1994, 3968, 4291, 4204, 4071, 4034, 1742, 2820, 3912, 3287, 4145, 354, 925, 1782, 926, 927, 3610, 357, 358, 359, 4224, 1918, 1959, 3736, 1770, 931, 4155, 364, 1279, 365, 1543, 2472, 367, 4049, 1633, 1722, 368, 369, 1495, 1566, 370, 1211, 1873, 933, 1748, 4142, 1434, 1358, 1191, 3732, 4110, 4039, 4411, 4506, 4270, 4156, 3780, 4036, 4030, 4016, 1550, 3899, 1247, 1855, 1181, 3919, 1639, 3664, 1244, 4140, 3930, 4117, 4189, 4001, 3799, 3643, 3619, 1240, 1686, 1479, 1307, 1575, 4296, 1665, 3871, 4135, 1605, 4408, 3604, 1274, 3741, 1938, 3709, 1727, 3893, 1280, 3622, 1784, 3834, 1752, 1983, 1743, 3979, 4461, 4113, 3817, 4232, 1340, 1489, 4214, 1219, 1486, 1512, 1481, 1516, 3820, 3789, 4252, 4047, 4330, 4082, 4094, 1574, 1248, 4078, 1872, 1426, 3785, 3687, 4318, 4243, 3866, 3704, 4172, 1621, 4315, 1192, 1513, 1856, 3324, 2769, 2678, 1561, 3296, 377, 1395, 4093, 4453, 3940, 3778, 4374, 4210, 4009, 4264, 4339, 4368, 1738, 378, 1610, 4194, 4474, 4013, 4266, 1771, 3860, 3832, 1349, 1381, 3663, 1642, 1185, 4356, 3932, 1233, 4212, 3858, 1198, 4192, 3611, 1919, 1819, 3790, 3712, 1969, 4095, 1887, 4468, 1720, 4247, 2002, 1657, 1663, 1336, 3894, 1554, 1494, 1405, 3576, 4314, 3695, 1851, 4362, 1815, 3845, 4511, 3656, 3638, 1406, 1596, 4454, 1443, 1661, 1359, 1734, 3650, 1910, 1648, 3831, 4435, 1208, 1988, 4451, 1993, 1986, 3849, 1718, 4068, 1835, 1425, 1428, 1282, 4380, 1658, 1452, 1687, 4024, 379, 4072, 3791, 4491, 4323, 4014, 1304, 1440, 1511, 1981, 1676, 1547, 4422, 1618, 1871, 1256, 3748, 4119, 1297, 1586, 1251, 1299, 4450, 3990, 4029, 4097, 3890, 3796, 1389, 3711, 4344, 1578, 1476, 4343, 1202, 4413, 4384, 3808, 1647, 1475, 3892, 3674, 1739, 3926, 3595, 1943, 3756, 4405, 3973, 4109, 4159, 3744, 4387, 1960, 4275, 3781, 1535, 1210, 4492, 4365, 4118, 3655, 3886, 4278, 4383, 4485, 1392, 3751, 3931, 3986, 3678, 1249, 4353, 4208, 3710, 4238, 4213, 3969, 4436, 3175, 4128, 2970, 1228, 3534, 3437, 3406, 3641, 3639, 3954, 4335, 3995, 3582, 4475, 3784, 4470, 4010, 3802, 3941, 4427, 4396, 4348, 3587, 3818, 3864, 3956, 3863, 3731, 3814, 4067, 4354, 4350, 4334, 3821, 1932, 3929, 4171, 1258, 3824, 3631, 4465, 4494, 1320, 1398, 3828, 1204, 1223, 1284, 1685, 3773, 4209, 3014, 4462, 4246, 4190, 4312, 4023, 3760, 3753, 1178, 3884, 2783, 4038, 3545, 2916, 3112, 2834, 3880, 3673, 4102, 4399, 4048, 3752, 4207, 1235, 3943, 4355, 4087, 4100, 4327, 4037, 4163, 3918, 4486, 1243, 3933, 4178, 1662, 1643, 4152, 3634, 3617, 4445, 4303, 1370, 3838, 4199, 4284, 1213, 4382, 1399, 1187, 3714, 1828, 4487, 3615, 1842, 1501, 3746, 4018, 4420, 3606, 4121, 3724, 3935, 1941, 4419, 4282, 1955, 1949, 4310, 4488, 1577, 4127, 1288, 1171, 3670, 4052, 1860, 4124, 4508, 4500, 3652, 3972, 1309, 1630, 1528, 3717, 1217, 3692, 4430, 3764, 4316, 4285, 3645, 3971, 4421, 1172, 4026, 2740, 3125, 3546, 1725, 1206, 3842, 4404, 3690, 3962, 4513, 4340, 4329, 4410, 3703, 4136, 1763, 1487, 3589, 3907, 4153, 2707, 3730, 4426, 4180, 4041, 3923, 4444, 3851, 4429, 4361, 1441, 4394, 4302, 3758, 4510, 3742, 1868, 4077, 1710, 1939, 1335, 1997, 1975, 1701, 4280, 1613, 4006, 1984, 1351, 3653, 3833, 1593, 2561, 4442, 3900, 4298, 1761, 4388, 1820, 1597, 4317, 4249, 1341, 1680, 4441, 3628, 3725, 1945, 937, 4206, 1588, 1439, 3794, 4447, 1838, 3776, 3658, 4064, 1377, 4011, 4272, 4503, 1367, 3594, 3680, 1300, 1750, 3913, 3774, 1877, 1987, 1862, 3998, 1380, 4185, 3686, 3696, 4463, 1350, 4008, 4230, 3853, 4244, 4083, 381, 1909, 3897, 1546, 3613, 3273, 3452, 3525, 1229, 4105, 3835, 383, 1234, 3970, 1492, 3856, 3586, 1175, 4321, 4020, 4144, 1224, 1199, 3667, 2778, 4412, 4407, 1812, 1810, 3823, 1416, 1427, 1507, 1878, 4333, 3146, 4281, 4211, 1179, 3843, 1669, 1677, 1524, 1525, 1974, 384, 1979, 1456, 1239, 4167, 3740, 1876, 1388, 1967, 1474, 385, 1342, 4125, 1508, 1580, 4060, 4378, 1576, 1212, 1893, 3921, 3585, 1174, 1396, 4061, 4015, 1207, 3698, 3825, 3922, 4021, 4181, 1598, 1916, 1429, 4502, 4231, 1321, 4390, 3693, 3734, 1382, 3684, 1747, 3806, 3896, 3635, 1768, 4025, 3976, 3840, 3963, 4286, 1502, 3836, 4161, 3659, 3743, 4130, 3605, 1385, 1783, 4392, 4328, 1316, 4173, 4265, 1246, 1985, 1629, 1829, 1737, 1837, 1914, 1839, 1834, 3984, 4495, 3910, 4160, 3671, 4184, 4132, 4250, 1503, 1237, 1523, 1417, 4063, 1562, 3977, 1971, 1707, 1847, 1792, 3769, 4074, 1534, 4239, 4003, 3915, 1689, 1776, 1599, 1265, 1655, 3874, 4261, 3626, 1791, 3579, 1644, 3936, 4054, 4260, 4359, 4131, 4297, 4357, 4022, 3770, 4046, 1222, 1996, 3788, 4169, 1925, 3953, 4228, 4226, 4277, 4101, 1889, 1369, 3797, 4088, 4019, 3771, 3632, 1402, 1520, 1767, 1466, 1194, 4137, 1908, 1927, 1758, 3772, 3661, 4186, 4174, 1170, 3850, 1315, 1611, 1530, 941, 4033, 3623, 3596, 1461, 1848, 1173, 1928, 1459, 1765, 1826, 3719, 1931, 3584, 4004, 3591, 3967, 4168, 3957, 3878, 4165, 4191, 3980, 4058, 4200, 4336, 3958, 1260, 4051, 3798, 4032, 1774, 4322, 3991, 4106, 1641, 1570, 3978, 3965, 4464, 3813, 4154, 1365, 4257, 3846, 4345, 4379, 3603, 1693, 3937, 3801, 1787, 1214, 4483, 4201, 1898, 1220, 4245, 1347, 3867, 1900, 3640, 3916, 4089, 1209, 3745, 3988, 3975, 4236, 4075, 4146, 4256, 4308, 4000, 4148, 3588, 3868, 4403, 3883, 4326, 4393, 3895, 4237, 3955, 3727, 4005, 4092, 4372, 4283, 1553, 3805, 4151, 1281, 1681, 4489, 3982, 4437, 3597, 4342, 3872, 3987, 4490, 3876, 3668, 4300, 1679, 1242, 3598, 3583, 3647, 389, 4304, 3793, 3779, 1937, 1907, 4042, 3648, 3996, 3800, 4367, 4099, 1807, 3887, 4428, 1625, 1390, 1884, 1682, 4364, 4306, 3869, 1278, 1672, 942, 1505, 1542, 1709, 1915, 3600, 3914, 1968, 3948, 1670, 3811, 1865, 1362, 1716, 3961, 1506, 4221, 1376, 1683, 4276, 1445, 1721, 1632, 3607, 1328, 1455, 1913, 1497, 1317, 1951, 1778, 1379, 3768, 4225, 1668, 390, 391, 4406, 4341, 1480, 395, 1714, 1422, 396, 2265, 397, 3618, 4433, 1177, 3898, 398, 949, 950, 399, 951, 400, 1965, 2345, 4471, 952, 402, 2475, 403, 404, 4139, 1482, 3602, 4434, 3721, 1592, 1519, 1352, 4202, 4409, 1977, 1917, 407, 408, 1631, 1684, 409, 3889, 958, 959, 412, 960, 414, 415, 961, 1905, 416, 963, 417, 3675, 1833, 3974, 420, 421, 965, 966, 969, 970, 422, 1897, 4754, 423, 4133, 3830, 972, 424, 973, 427, 1708, 4141, 3749, 431, 1619, 975, 4044, 3590, 1944, 4126, 1923, 1706, 4400, 434, 1606, 979, 2604, 2895, 436, 3448, 1692, 983, 3862, 4055, 4358, 984, 985, 1664, 4045, 3854, 3682, 2491, 445, 1972, 2688, 4366, 3425, 3231, 3649, 2759, 2724, 3873, 3755, 1216, 3599, 3775, 2754, 2606, 3471, 3234, 2565, 2803, 2562, 2684, 3411, 3405, 2690, 1255, 3694, 3535, 1306, 4084, 3282, 1780, 987, 988, 450, 990, 451, 452, 991, 992, 1728, 994, 995, 454, 1696, 998, 3116, 1869, 456, 1386, 999, 3879, 2698, 1001, 461, 1447, 462, 464, 4425, 1645, 1231, 1468, 472, 473, 4725, 476, 1273, 1007, 1744, 1488, 1659, 477, 1604, 481, 4313, 482, 483, 1499, 484, 2513, 1016, 4073, 1777, 1458, 4274, 4539, 4528, 487, 1775, 4205, 1526, 1697, 1017, 2000, 489, 1882, 1817, 1880, 490, 1018, 3917, 3616, 4311, 1800, 4473, 4085, 4401, 1310, 3783, 3765, 491, 1948, 3699, 1735, 3792, 4290, 495, 4090, 2247, 496, 1019, 2012, 1803, 3642, 1322, 498, 1021, 501, 1022, 502, 1333, 503, 1023, 1890, 1025, 510, 1026, 3608, 1732, 511, 2397, 1864, 1816, 1531, 3636, 1699, 1027, 1029, 1366, 2112, 2124, 2376, 1261, 4027, 3478, 3763, 2959, 517, 3197, 1595, 3413, 1448, 518, 2057, 1675, 1797, 2148, 2420, 520, 2315, 523, 1999, 3759, 1215, 4122, 1730, 524, 526, 3966, 3911, 529, 3289, 1821, 530, 531, 1874, 1038, 536, 537, 3767, 1929, 1041, 1042, 3683, 542, 1338, 1517, 4331, 4332, 4466, 2719, 3803, 4123, 4233, 1824, 3129, 3087, 3505, 4158, 4254, 1449, 3720, 4351, 4414, 1673, 3453, 3254, 1649, 544, 545, 546, 4240, 3580, 1046, 1047, 550, 2598, 551, 552, 3819, 1259, 4062, 2841, 1050, 3515, 4301, 557, 1052, 1053, 3738, 1567, 1270, 3857, 1055, 2198, 1257, 1238, 3662, 561, 562, 1058, 566, 1060, 1061, 2231, 4203, 1899, 3981, 1062, 1303, 4116, 567, 1946, 3620, 1514, 4002, 3679, 3964, 3707, 3666, 1348, 4273, 1804, 4497, 1401, 4438, 1895, 1264, 572, 1912, 3939, 4170, 4056, 1271, 1065, 1521, 1221, 1451, 1654, 3934, 4080, 4352, 1700, 3739, 1565, 1419, 1811, 3950, 1690, 1397, 3716, 1437, 1674, 4337, 1285, 4268, 1183, 3726, 3881, 4134, 4347, 4012, 3938, 4066, 4198, 4416, 4164, 3630, 4229, 4292, 4193, 4325, 4375, 4371, 4432, 4215, 1753, 3944, 1409, 4195, 1729, 4223, 1540, 1723, 1070, 3750, 3633, 4070, 4104, 4162, 4235, 1863, 4346, 1881, 1814, 1572, 4443, 3761, 1346, 1587, 1072, 3592, 576, 1891, 4469, 1275, 1950, 1963, 4129, 1296, 1551, 3733, 4111, 3993, 4108, 3949, 1287, 1713, 1736, 1995, 1435, 1424, 1830, 1705, 1861, 1197, 1254, 4120, 1545, 4417, 1469, 1785, 1236, 4293, 3839, 3983, 4395, 1957, 3928, 4295, 3715, 3855, 3609, 1990, 4076, 4175, 3927, 1757, 1650, 4299, 1773, 2004, 1267, 1364, 579, 1462, 1879, 4007, 3729, 3665, 3722, 1691, 1624, 1751, 1394, 3924, 3952, 580, 581, 2003, 1343, 1559, 1250, 1555, 4114, 1818, 1075, 1076, 1077, 1704, 4448, 1078, 1079, 1786, 585, 3354, 1832, 3432, 2891, 2505, 1903, 1081, 1082, 4459, 1083, 1563, 590, 591, 1085, 594, 597, 598, 1453, 2559, 2590, 2738, 4478, 4069, 1809, 1327, 4150, 3260, 3481, 3672, 3625, 2008, 4439, 3852, 3997, 1411, 599, 3847, 1268, 4050, 3377, 4424, 1496, 4143, 4493, 3492, 1962, 600, 601, 4017, 4477, 1794, 4263, 3072, 2009, 1754, 1087, 1088, 3888, 2324, 605, 1368, 3827, 4103, 606, 4549, 1090, 1571, 1091, 1438, 1092, 1093, 612, 1094, 3701, 4389, 613, 1603, 616, 1332, 1715, 4369, 1652, 1096, 617, 1541, 618, 1921, 1733, 1373, 1870, 619, 4218, 1798, 1099, 1100, 1702, 2239, 1101, 1667, 1384, 623, 3700, 1788, 1600, 624, 626, 2771, 627, 1339, 3875, 628, 629, 3070, 4818, 4860, 2557, 2795, 2906, 3118, 4657, 4646, 4875, 4627, 4747, 1614, 1947, 4618, 4479, 3766, 632, 1104, 1105, 633, 635, 1813, 636, 2213, 3706, 1110, 640, 1111, 641, 642, 1694, 3431, 2838, 3483, 3464, 3848, 2558, 3314, 3086, 3029, 2956, 3517, 2651, 2914, 2680, 2632, 3121, 3100, 3528, 3526, 3084, 4220, 3304, 2846, 1186, 3235, 2903, 3559, 2687, 3409, 3237, 2900, 2999, 3349, 3171, 2752, 3262, 3504, 3047, 4376, 3193, 3430, 2525, 2670, 2911, 3508, 2776, 2697, 3200, 2790, 3323, 2543, 2874, 2614, 3904, 3373, 3054, 2617, 4242, 3621, 2708, 4179, 4398, 3959, 3095, 1286, 3624, 4481, 1432, 3511, 2735, 4381, 3295, 1585, 1114, 1766, 3221, 2643, 2739, 3920, 644, 1116, 645, 646, 2307, 647, 1801, 4279, 3762, 1637, 1509, 1119, 2965, 2369, 2695, 3293, 650, 651, 1120, 652, 1121, 4909, 1122, 3264, 655, 658, 659, 4035, 2910, 3391, 2808, 3099, 2913, 3676, 2852, 3284, 2731, 1609, 3994, 1319, 4467, 1802, 1227, 1623, 661, 2364, 662, 663, 664, 1124, 1125, 1127, 1128, 1129, 668, 669, 1130, 670, 1131, 1527, 1132, 671, 1772, 1135, 672, 5005, 2208, 4952, 4945, 1933, 1731, 1793, 675, 676, 3342, 1138, 1139, 677, 679, 1142, 1143, 681, 1145, 682, 685, 688, 3822, 689, 690, 691, 1147, 1601, 3905, 694, 695, 1414, 4793, 4575, 1150, 1795, 1372, 1695, 1866, 4115, 1719, 698, 2217, 1920, 699, 700, 1544, 702, 703, 4031, 4305, 1636, 1393, 2010, 3810, 4452, 3677, 4227, 1277, 1400, 4402, 4157, 4197, 1337, 1253, 1532, 4028, 3989, 1493, 1854, 1902, 1510, 2340, 4182, 706, 707, 708, 4476, 1245, 714, 1841, 4234, 1314, 4096, 717, 1155, 2249, 4217, 1156, 723, 1157, 1627, 725, 1159, 1953, 1160, 1201, 727, 3787, 4568, 3747, 730, 1846, 3815, 2005, 1964, 1822, 1262, 4480, 1537, 1291, 1318, 4294, 1582, 734, 3439, 2833, 4287, 4509, 4505, 4267, 3697, 3272, 4112, 2967, 3651, 1628, 3705, 1195, 3859, 1164, 2394, 1165, 1166, 1745, 1973, 1168, 3807, 4307, 2303, 1454, or 1781. In some aspects, the 581 to 589 region of the VP capsid polypeptide has a sequence of any one of SEQ ID NOs: 4884, 738, 4177, 1289, 740, 14, 743, 744, 17, 3477, 1548, 3051, 2982, 2877, 746, 19, 3036, 3426, 3073, 3169, 747, 3362, 2784, 4889, 21, 3192, 4942, 22, 1638, 748, 24, 749, 27, 1703, 1836, 28, 3660, 29, 750, 1640, 33, 35, 36, 2450, 1653, 1205, 3795, 753, 4288, 4219, 2770, 2962, 4241, 4107, 2718, 3317, 4391, 3263, 2553, 3947, 2710, 2608, 3467, 2796, 2961, 2529, 3320, 2674, 2635, 3446, 3053, 3250, 3688, 1998, 4320, 3351, 2655, 3514, 2779, 3194, 3319, 3224, 3281, 3708, 2807, 3562, 3274, 3374, 3013, 3416, 2981, 3065, 2777, 3469, 2977, 2638, 2972, 3059, 2574, 3380, 4262, 3167, 3368, 2781, 3547, 3386, 1225, 2960, 3485, 3370, 3443, 2824, 1467, 3327, 3178, 3006, 3252, 2991, 3470, 2888, 2572, 3418, 2642, 2519, 3363, 40, 2633, 44, 45, 756, 47, 48, 1952, 3122, 2551, 3718, 3484, 3577, 759, 50, 1308, 3960, 1378, 2994, 3080, 2589, 3681, 51, 760, 2389, 762, 3925, 3654, 763, 4626, 59, 60, 4086, 1740, 1660, 62, 1966, 63, 2438, 768, 66, 67, 2197, 68, 3816, 2599, 2706, 72, 73, 74, 3865, 1549, 1361, 2453, 3882, 773, 3713, 1942, 1312, 4501, 76, 1413, 775, 1560, 4289, 3757, 3593, 3908, 4397, 4415, 3723, 3754, 4360, 3945, 2854, 3523, 3669, 1356, 2132, 4065, 1294, 1484, 85, 86, 3891, 4456, 4040, 4496, 1982, 2001, 1478, 1189, 1490, 1885, 1926, 89, 780, 1180, 92, 781, 782, 783, 2356, 786, 94, 95, 788, 1831, 1867, 96, 4458, 97, 1970, 4656, 1936, 1590, 98, 99, 789, 790, 1298, 101, 1688, 791, 792, 2007, 102, 103, 104, 105, 107, 108, 1579, 110, 1906, 111, 798, 112, 799, 800, 2461, 1444, 801, 114, 115, 1344, 116, 802, 117, 118, 119, 121, 803, 1463, 1760, 124, 806, 126, 128, 807, 129, 131, 808, 2281, 133, 1978, 811, 812, 135, 136, 137, 138, 814, 140, 1326, 141, 142, 143, 2344, 816, 1634, 1302, 817, 818, 147, 148, 149, 150, 151, 154, 155, 819, 820, 156, 157, 2295, 158, 161, 162, 165, 822, 168, 169, 170, 823, 172, 1651, 173, 1483, 174, 825, 176, 178, 180, 827, 181, 828, 4911, 184, 185, 186, 188, 189, 830, 192, 193, 194, 196, 1391, 197, 198, 199, 200, 201, 202, 203, 4775, 205, 832, 206, 834, 207, 208, 209, 210, 835, 836, 1334, 3901, 3312, 2649, 1450, 4386, 3028, 1446, 2206, 215, 1522, 3490, 217, 219, 1612, 220, 221, 222, 839, 223, 840, 224, 225, 4751, 228, 229, 230, 231, 2448, 842, 232, 233, 4782, 234, 235, 238, 847, 239, 850, 851, 853, 1536, 240, 241, 242, 243, 244, 245, 246, 247, 4923, 4696, 250, 251, 254, 255, 857, 256, 258, 259, 859, 260, 861, 862, 4966, 864, 263, 4970, 2318, 865, 2326, 264, 1241, 266, 1477, 867, 268, 868, 269, 270, 869, 870, 271, 871, 872, 272, 873, 4655, 4972, 1252, 1591, 875, 274, 275, 1980, 276, 876, 877, 2066, 277, 278, 280, 2323, 1892, 1539, 2214, 881, 882, 3601, 3877, 1930, 1460, 282, 1799, 284, 4553, 4772, 1626, 286, 1374, 1620, 1290, 1354, 887, 1956, 889, 4765, 292, 4324, 4138, 891, 296, 3903, 297, 3829, 3809, 4271, 3844, 1436, 300, 1617, 1961, 5010, 302, 304, 305, 2147, 1589, 4370, 307, 3646, 4059, 1431, 1331, 312, 1779, 313, 896, 1558, 1552, 318, 319, 322, 1958, 2454, 323, 324, 901, 1491, 328, 329, 330, 4820, 4484, 1756, 907, 4584, 3536, 2701, 2799, 3332, 3294, 3159, 3069, 2637, 3025, 2782, 3247, 3350, 2692, 2586, 3004, 3049, 2694, 2650, 3554, 2983, 3403, 3214, 3163, 2541, 3090, 3097, 3462, 1430, 2941, 3486, 2842, 3558, 3104, 3037, 3419, 2780, 2931, 1276, 2928, 2609, 3068, 3128, 2548, 2538, 2618, 2789, 3228, 2657, 3189, 2863, 3307, 3300, 2546, 3048, 3543, 2946, 2975, 3346, 3067, 2728, 2955, 3408, 3027, 3094, 3203, 2988, 2751, 2953, 2566, 2578, 2823, 3063, 3335, 3000, 3181, 3011, 3138, 3389, 2805, 3074, 2894, 3149, 2560, 3417, 3265, 3378, 2901, 2837, 2822, 2745, 3473, 3530, 3040, 2597, 3509, 3522, 3161, 2926, 3209, 3105, 3400, 2630, 2905, 2671, 2818, 2806, 2702, 2709, 3549, 3538, 2534, 2773, 2623, 3491, 3243, 3136, 2693, 3164, 3343, 2918, 2555, 2794, 2679, 3510, 3110, 2672, 3442, 2929, 3184, 3488, 3414, 3093, 2996, 3141, 3544, 3102, 2856, 2957, 3466, 3461, 2788, 2660, 3344, 3204, 2720, 3379, 2826, 1789, 2785, 3249, 3527, 4460, 3352, 2569, 4457, 2011, 4319, 3906, 1533, 1755, 4248, 1557, 3804, 1602, 4188, 1330, 4349, 3337, 3533, 2629, 3038, 2539, 3567, 3291, 3348, 3115, 3359, 2993, 3079, 3506, 2527, 2963, 2938, 2516, 3113, 2639, 3143, 3044, 2747, 3154, 3280, 3039, 2743, 2902, 3056, 2554, 2522, 3103, 3210, 3434, 2656, 4251, 4196, 3206, 3328, 2588, 3553, 2714, 3078, 3222, 3137, 3357, 2717, 2944, 3012, 3220, 3202, 2811, 3083, 3269, 3566, 2699, 2515, 3023, 2533, 3288, 3075, 3005, 2685, 3058, 2976, 2622, 3333, 3463, 2939, 3521, 3268, 3117, 2626, 2616, 3240, 2570, 3565, 2919, 3157, 2849, 3444, 2631, 3420, 2659, 3325, 3186, 2920, 3258, 3440, 3457, 3310, 2761, 3134, 2621, 3531, 2711, 2774, 2867, 2585, 3155, 2620, 3156, 2844, 3126, 3160, 2909, 3542, 3225, 2887, 3474, 3218, 2744, 2896, 3135, 3424, 3498, 3529, 2661, 2667, 2549, 2819, 2768, 2935, 3182, 2772, 3230, 3043, 2922, 3581, 2869, 2610, 3298, 2775, 3108, 2603, 2612, 2860, 3187, 3238, 3786, 4385, 3016, 3436, 2876, 2987, 3532, 3438, 3561, 3259, 2663, 2890, 3433, 3071, 3018, 2580, 2755, 3015, 2540, 3398, 2664, 2583, 2830, 2644, 2641, 3513, 2725, 2723, 3338, 3556, 2866, 2514, 2932, 2753, 2862, 2899, 2605, 2989, 3096, 3124, 2985, 2716, 3145, 3017, 2591, 2640, 3033, 3216, 3316, 3412, 2971, 3256, 3153, 3575, 3339, 2915, 2531, 3552, 3475, 3060, 3375, 2756, 3382, 2847, 2859, 3251, 3702, 3423, 2537, 2801, 3076, 2696, 3092, 3459, 3144, 3441, 2802, 3479, 2907, 3512, 3518, 3021, 2871, 3032, 2647, 2945, 3045, 2763, 3313, 3034, 3315, 3541, 2746, 2669, 2524, 3003, 2732, 3166, 3046, 3306, 2873, 3364, 3253, 3215, 3061, 2804, 2722, 2964, 2990, 2836, 3173, 2762, 3737, 2628, 3507, 2564, 3031, 2872, 3360, 2658, 2930, 2904, 3244, 3217, 3311, 3445, 2840, 3372, 2958, 3098, 3356, 3456, 3388, 2624, 3207, 2576, 2742, 2665, 2815, 3052, 3421, 2593, 3242, 2535, 2966, 2898, 2858, 2943, 2668, 2798, 3196, 2528, 2713, 3001, 2691, 2948, 2767, 2544, 3302, 2734, 2893, 2592, 2861, 3502, 2969, 2582, 3229, 2676, 2545, 3255, 3330, 2547, 3257, 2882, 3151, 3088, 2883, 3318, 2645, 2733, 2587, 3500, 3008, 2715, 2845, 3183, 2654, 3233, 3267, 2741, 2827, 2704, 3091, 2832, 2736, 3177, 3271, 2835, 2908, 3176, 2947, 3292, 3191, 2517, 3026, 3082, 3392, 3381, 2584, 2712, 3213, 3451, 2634, 3150, 2810, 3303, 2573, 3460, 2615, 3394, 2828, 3329, 4377, 4499, 3555, 2974, 3629, 3578, 3885, 2817, 3248, 2954, 3334, 3571, 3345, 3551, 3384, 3422, 2530, 2973, 4418, 4081, 3951, 1764, 1671, 1843, 3449, 3185, 3399, 2786, 3055, 3472, 3397, 2601, 3564, 3277, 4373, 3548, 3179, 3407, 3841, 3347, 3142, 4431, 3241, 3077, 2700, 3147, 2648, 3283, 2829, 3278, 2581, 2536, 4363, 2848, 3410, 2797, 2523, 2520, 2721, 3496, 2571, 3198, 3219, 3030, 2673, 2921, 3301, 3322, 2705, 3239, 2949, 3369, 3396, 2892, 2897, 2766, 3174, 3297, 2550, 2889, 2933, 2793, 2627, 2677, 3119, 2596, 3226, 3172, 3089, 2868, 2839, 3120, 3286, 2843, 3465, 3946, 4222, 2682, 2865, 3539, 3168, 2864, 3308, 3557, 2940, 3109, 3503, 2625, 3455, 3114, 2595, 3331, 2978, 2518, 2521, 4079, 3024, 3573, 2952, 2653, 3180, 2813, 2652, 2600, 2816, 3201, 3188, 3270, 2997, 2992, 3009, 3520, 2936, 3275, 3165, 3447, 3131, 3305, 2809, 2792, 2729, 2814, 2619, 3266, 2825, 3066, 2857, 2998, 3064, 2681, 3035, 3279, 2764, 3480, 3127, 2912, 3010, 2607, 3211, 3111, 3041, 4269, 3487, 3489, 3019, 1266, 1415, 2980, 3428, 3435, 3482, 3020, 2748, 2646, 2787, 2760, 2563, 3085, 3133, 3158, 3170, 2703, 3494, 2556, 2552, 3395, 3245, 3404, 2675, 2791, 1911, 908, 1935, 2749, 3341, 3355, 2575, 2942, 2886, 2758, 2594, 3495, 2884, 3516, 3042, 2737, 2923, 3563, 2855, 3476, 2611, 2937, 3383, 3497, 3402, 3162, 2662, 2875, 3223, 2878, 1808, 3285, 2757, 3057, 2951, 3519, 2579, 2853, 3387, 3401, 3493, 3393, 1608, 3365, 2885, 3574, 3081, 3007, 3568, 3152, 3367, 3358, 336, 3468, 3290, 3550, 3132, 2726, 2879, 3190, 3309, 2613, 2765, 3106, 1355, 3454, 2851, 2881, 3232, 3458, 3326, 3353, 2927, 3212, 2950, 3376, 3208, 3062, 3612, 3195, 3385, 2686, 2602, 3569, 3123, 2727, 1622, 2821, 2636, 2750, 2850, 3050, 2925, 3336, 3540, 2689, 3139, 2526, 3361, 3022, 3427, 3107, 3140, 3371, 3276, 2831, 3501, 2924, 3366, 3199, 3101, 3321, 3499, 2917, 2683, 2800, 2812, 3340, 3227, 3148, 3657, 4446, 1746, 1464, 1886, 2666, 3246, 3130, 3560, 3236, 2730, 3572, 3689, 2968, 1457, 3450, 2577, 2567, 2532, 3415, 2934, 2984, 2568, 4147, 3002, 2986, 910, 2979, 2542, 1762, 4472, 1529, 4057, 1976, 4507, 1583, 1711, 2013, 1594, 4440, 343, 344, 920, 921, 348, 4498, 3728, 3637, 3570, 3429, 4091, 2870, 2995, 4338, 3205, 2880, 3261, 3968, 4291, 4204, 4071, 4034, 1742, 2820, 3912, 3287, 1218, 1190, 4145, 354, 1782, 927, 3610, 356, 4224, 1918, 1959, 1840, 3736, 1770, 929, 930, 931, 4155, 360, 361, 362, 364, 1279, 365, 1543, 366, 367, 4049, 1633, 1722, 369, 1495, 1566, 373, 1211, 2494, 1726, 1442, 1748, 4142, 1434, 1358, 1191, 3732, 4110, 4039, 4411, 4506, 4156, 4036, 4030, 4016, 3899, 1247, 1855, 3919, 1244, 4140, 3930, 4117, 4189, 4001, 3643, 3619, 1240, 1575, 3871, 4135, 4408, 3604, 1274, 4149, 3741, 1938, 3709, 3622, 3834, 1983, 1743, 3979, 4461, 4113, 3817, 4232, 4214, 3902, 1219, 1486, 1512, 1516, 4047, 4082, 4094, 1574, 1248, 4078, 1872, 1426, 3785, 3687, 4318, 4243, 3866, 3704, 4172, 1513, 1856, 3324, 2769, 2678, 1561, 3296, 2348, 377, 1395, 1584, 4093, 4453, 3778, 4210, 4009, 4264, 4339, 1738, 4194, 4474, 4013, 4266, 1771, 1759, 1922, 3860, 3832, 1349, 1381, 3663, 1185, 3932, 3858, 1198, 4192, 3611, 1919, 3790, 3712, 4095, 1887, 4468, 1720, 4247, 934, 1790, 2002, 1657, 1336, 3894, 1554, 3576, 4314, 3695, 1850, 4362, 1815, 3656, 3638, 4454, 1443, 1661, 4504, 1359, 3650, 1305, 1648, 3831, 4435, 4451, 1993, 3849, 1718, 4068, 1835, 1425, 1428, 4380, 1658, 1452, 4024, 4072, 3791, 4491, 4323, 4014, 1304, 1511, 1981, 1676, 4422, 1283, 3861, 3644, 4259, 1749, 1418, 1176, 4216, 1924, 1421, 3992, 4423, 4253, 3748, 4119, 1297, 1299, 1954, 4450, 3990, 4029, 3711, 4344, 1578, 4384, 3892, 3674, 3595, 4405, 3973, 4109, 4159, 3744, 4387, 1960, 4275, 4492, 4365, 4118, 3655, 3886, 4278, 3751, 3678, 4353, 3175, 2970, 1228, 3534, 3437, 3406, 3641, 3639, 4470, 3941, 4348, 3587, 3818, 3814, 4350, 3821, 3929, 3824, 4465, 4494, 1398, 3828, 1284, 3773, 4209, 3014, 3884, 2783, 4038, 3545, 2916, 3112, 2834, 3880, 4399, 4048, 3752, 4207, 1235, 3943, 4355, 4087, 4100, 4163, 4486, 4178, 1643, 4152, 3634, 4445, 4303, 4284, 1213, 4382, 1399, 3714, 4487, 3615, 4018, 4420, 4121, 3724, 4282, 4310, 4488, 4127, 3670, 4052, 3627, 3777, 1371, 3685, 4482, 4258, 3812, 1581, 4124, 4508, 4500, 3652, 3972, 1309, 1528, 3717, 1217, 2740, 3125, 3546, 3842, 4404, 3690, 3962, 4329, 4410, 3703, 4136, 3589, 3907, 4153, 2707, 4180, 3923, 4444, 4361, 4394, 4302, 3758, 4510, 3742, 1710, 1335, 1666, 1407, 4187, 1193, 1188, 1196, 1724, 1717, 1200, 1997, 1701, 4280, 4006, 1984, 3833, 1593, 2561, 4442, 3900, 4298, 1761, 4388, 1597, 4317, 4249, 1341, 1203, 1680, 4441, 3628, 3725, 1945, 937, 4206, 1588, 1439, 3794, 4447, 3776, 3658, 4064, 4011, 4272, 4503, 1324, 1367, 3594, 3680, 1300, 1750, 3913, 3774, 1877, 1987, 3998, 1380, 4185, 3686, 3696, 4463, 3853, 4244, 4083, 1909, 3897, 1546, 3613, 3273, 3452, 3525, 1229, 3835, 1234, 3970, 3856, 3586, 1175, 4321, 2778, 4412, 4407, 1810, 3823, 1427, 1507, 1878, 4333, 3146, 4281, 4211, 1179, 3843, 1677, 1524, 1525, 1974, 1239, 4167, 3740, 1342, 1471, 4176, 1232, 1989, 4125, 1741, 1580, 4060, 1576, 1212, 3921, 1174, 4061, 4021, 3693, 3734, 1382, 3684, 3806, 3635, 3976, 3840, 4286, 3836, 4161, 3659, 3743, 3605, 4392, 4328, 1316, 4173, 4265, 1246, 1629, 1829, 3826, 1992, 1656, 1837, 1914, 1839, 3984, 3910, 4160, 4184, 4132, 4250, 1562, 1847, 1792, 3769, 1534, 4003, 1689, 1599, 1265, 1410, 1823, 1498, 1329, 386, 940, 1655, 3874, 4261, 3626, 3579, 1644, 3936, 4054, 4260, 4297, 4357, 4022, 4046, 1222, 1996, 3788, 3953, 4226, 4277, 4101, 3797, 4019, 3771, 3632, 1402, 4137, 3772, 3661, 4186, 4174, 1170, 3850, 1315, 1611, 1859, 4183, 1403, 4033, 3623, 3596, 1461, 1848, 1173, 1928, 1765, 3719, 3584, 3591, 4165, 4191, 3980, 4058, 4200, 4336, 3958, 1260, 4051, 3798, 4032, 1774, 4322, 3991, 4106, 3978, 3965, 4464, 3813, 4154, 1365, 3846, 4345, 4379, 3603, 1693, 3937, 3801, 1787, 1214, 4483, 4201, 1898, 1845, 1220, 4245, 1347, 3867, 1900, 3640, 3916, 4089, 3745, 3975, 4256, 4308, 4000, 3868, 4403, 3883, 4326, 4393, 3895, 4237, 3955, 4005, 4092, 4372, 4283, 3805, 4151, 3982, 3597, 3872, 3987, 4490, 3876, 3668, 4300, 1679, 1242, 3598, 3583, 3647, 4304, 3779, 1907, 4042, 3648, 3996, 3800, 4367, 4099, 1807, 3887, 4428, 1625, 1390, 1884, 1682, 4364, 4306, 3869, 1278, 942, 1505, 1542, 1709, 3600, 3914, 3948, 1865, 1716, 3961, 1506, 4221, 1376, 1683, 4276, 1721, 1632, 3607, 1455, 1913, 1497, 1317, 1951, 1778, 3768, 4225, 1668, 390, 4406, 4341, 1480, 392, 1714, 1422, 397, 3618, 4433, 1177, 3898, 398, 950, 400, 1965, 4471, 953, 401, 403, 955, 1482, 3602, 4434, 3721, 1592, 1825, 1698, 1519, 1352, 4409, 1977, 405, 1631, 1684, 409, 3889, 2117, 411, 413, 414, 415, 961, 1905, 416, 963, 3675, 1833, 3974, 965, 970, 1897, 1272, 971, 4133, 3830, 972, 424, 427, 1708, 4141, 3749, 1619, 975, 4044, 3590, 1944, 4126, 1923, 1706, 432, 976, 978, 4400, 433, 1606, 980, 2604, 2895, 436, 3448, 2188, 438, 1692, 982, 2243, 439, 442, 3862, 4055, 4358, 2276, 985, 1664, 443, 4309, 4045, 3854, 3682, 1972, 2688, 4366, 3425, 3231, 3649, 2759, 2724, 3755, 1216, 3599, 3775, 2754, 2606, 3471, 3234, 2565, 2803, 2562, 2684, 3411, 3405, 2690, 1255, 3694, 3985, 3535, 1306, 4084, 3282, 1353, 1780, 448, 2031, 990, 991, 1485, 992, 1728, 993, 4703, 994, 1696, 997, 998, 3116, 1869, 456, 1386, 4778, 2040, 1000, 4981, 3879, 2698, 460, 1001, 461, 1447, 1002, 1003, 463, 464, 4425, 465, 1004, 466, 469, 1231, 1468, 470, 2496, 1005, 476, 1273, 1744, 1488, 1659, 4598, 1604, 479, 1013, 1014, 481, 4313, 1499, 1016, 4073, 1777, 2172, 485, 4274, 4599, 4796, 487, 4710, 1775, 4205, 1526, 1697, 2000, 488, 1894, 1882, 1817, 1880, 490, 1018, 3917, 3616, 4311, 1800, 4473, 4085, 4401, 3783, 3765, 1538, 3870, 491, 3699, 3792, 4290, 2074, 492, 494, 2421, 4090, 2012, 1803, 3642, 1322, 1020, 502, 1333, 504, 4805, 1890, 507, 3608, 1732, 511, 2397, 1864, 1816, 1531, 513, 3636, 514, 1699, 1027, 4987, 1366, 4664, 4950, 4027, 3478, 2959, 1293, 3197, 1595, 3413, 518, 4698, 1032, 1033, 1675, 1797, 4578, 4854, 2315, 521, 1999, 3759, 1215, 4122, 1730, 3966, 1035, 4973, 528, 3911, 3289, 1821, 530, 2426, 532, 1874, 533, 1038, 538, 539, 3767, 1929, 3683, 2100, 4853, 1338, 2021, 1616, 1901, 1796, 1517, 4331, 4332, 4466, 2719, 4123, 4233, 1824, 3129, 3087, 3505, 4158, 4254, 3720, 4351, 4414, 3453, 3254, 1649, 544, 4240, 3580, 1046, 548, 549, 2598, 552, 553, 3819, 1259, 4062, 554, 2841, 3515, 1433, 1323, 4301, 555, 558, 3738, 1567, 559, 1054, 1270, 3857, 2175, 1257, 1238, 3662, 561, 1058, 563, 4872, 2097, 1061, 4203, 1899, 3981, 1062, 1303, 4116, 570, 1946, 3620, 1514, 4002, 3679, 3964, 3707, 3666, 1348, 4273, 1804, 4497, 571, 1401, 4438, 1895, 1264, 1912, 573, 3939, 4170, 4056, 1271, 1521, 1221, 1451, 3934, 4080, 4352, 1700, 3739, 1419, 1811, 3950, 1690, 3716, 1569, 1437, 1674, 4337, 1285, 4268, 1183, 3881, 3938, 4198, 4416, 4229, 4292, 4193, 4325, 4375, 4432, 4215, 3944, 1409, 4195, 4223, 1540, 4455, 4512, 1723, 3750, 4070, 4104, 4235, 1863, 4346, 1881, 1071, 1814, 4443, 3761, 1346, 1587, 3592, 576, 4469, 1275, 1950, 4129, 1296, 1551, 3733, 4111, 3993, 4108, 3949, 1287, 1713, 1556, 1736, 1995, 1705, 1861, 4120, 4417, 1292, 1785, 1236, 4293, 1827, 3839, 3983, 4395, 1957, 3928, 4295, 3715, 3855, 3609, 4076, 4175, 3927, 1757, 4299, 1773, 1364, 1462, 4007, 3729, 3665, 3722, 1691, 1712, 1624, 1751, 1394, 3924, 3952, 581, 2003, 1559, 1250, 1555, 4114, 1818, 1076, 4448, 1078, 1786, 3354, 1832, 3432, 2891, 4583, 1903, 1080, 4459, 589, 1563, 1084, 591, 592, 594, 595, 1858, 596, 598, 1453, 2559, 2590, 2738, 4478, 4069, 1809, 1327, 4150, 3260, 3481, 3672, 3625, 4439, 3852, 3997, 3847, 4050, 3377, 4424, 4143, 4493, 3492, 1412, 601, 4017, 4477, 1794, 602, 4263, 3072, 2009, 1754, 1088, 3888, 603, 604, 1368, 3827, 4103, 1571, 1438, 2069, 611, 1093, 612, 1094, 3701, 4389, 614, 5000, 615, 1332, 1715, 4369, 1652, 1541, 1921, 1733, 1373, 1870, 619, 4218, 1798, 1702, 1384, 3700, 1788, 1600, 624, 2473, 1423, 2771, 1339, 3875, 3070, 2015, 2557, 2795, 2906, 2103, 3299, 3118, 4838, 4965, 4605, 4576, 1103, 1614, 1947, 631, 4479, 3766, 1107, 635, 1813, 636, 2431, 637, 1109, 4577, 639, 3706, 1110, 640, 1111, 4581, 4644, 4734, 642, 3735, 3390, 1694, 3431, 2838, 3483, 3464, 3848, 2558, 3314, 3086, 3029, 2956, 3517, 2651, 2914, 2680, 2632, 3121, 3100, 3528, 3526, 3084, 4220, 3304, 2846, 1186, 3235, 2903, 3559, 2687, 3409, 3237, 2900, 2999, 3349, 3171, 2752, 3262, 3504, 3047, 3193, 3430, 2525, 2670, 2911, 3508, 2776, 2697, 3200, 2790, 3323, 2543, 2874, 2614, 3904, 3373, 3054, 2617, 4242, 3621, 2708, 4179, 4398, 3959, 1269, 3095, 1286, 3624, 4481, 3511, 2735, 4381, 3295, 1585, 1568, 1766, 3221, 2643, 2739, 4629, 3920, 4603, 2307, 647, 1801, 4279, 3762, 1637, 1509, 4590, 648, 1117, 4800, 4724, 4674, 1119, 2965, 2695, 3293, 4722, 1121, 4784, 653, 1122, 3264, 655, 656, 657, 4035, 2910, 3391, 2808, 3099, 2913, 3676, 2852, 3284, 2731, 3537, 3994, 1319, 4467, 1623, 660, 4714, 4812, 1123, 664, 2138, 1126, 1128, 1129, 1130, 670, 1527, 671, 1772, 1133, 2196, 1136, 1137, 5005, 1933, 1731, 1793, 3342, 1140, 1141, 4525, 687, 3822, 1601, 1148, 693, 3905, 694, 1414, 1149, 4756, 4859, 2258, 697, 1795, 1372, 1695, 1866, 1151, 4115, 1719, 2194, 1920, 4999, 1544, 703, 4031, 4305, 1636, 1393, 3810, 4452, 3677, 4227, 4402, 4157, 4197, 1337, 1253, 1532, 4028, 3989, 4715, 704, 1493, 1902, 1152, 4824, 4182, 707, 708, 709, 4732, 4476, 1375, 713, 714, 715, 1841, 4234, 1154, 1314, 4096, 4895, 718, 719, 720, 2063, 1311, 721, 4903, 4885, 4217, 1627, 2116, 1158, 724, 5013, 4894, 1953, 1201, 3787, 729, 2485, 3747, 730, 1846, 3815, 1964, 1822, 1262, 4480, 1537, 1291, 1318, 4976, 4294, 1582, 4587, 3439, 2833, 4287, 4509, 4505, 4267, 3697, 3272, 4112, 2967, 3651, 1805, 3705, 1195, 3859, 1164, 1165, 2351, 4835, 4571, 2423, 1745, 1973, 1168, 3807, 4307, 1169, 1454, or 1781. In some aspects, the 581 to 589 region of the VP capsid polypeptide has a sequence of any one of SEQ ID NOs: 4177, 1289, 740, 3477, 1548, 3051, 2982, 2877, 3036, 3426, 3073, 3169, 747, 3362, 2784, 21, 3192, 1638, 748, 1703, 1836, 3660, 29, 750, 1640, 33, 35, 36, 1205, 3795, 753, 4288, 4219, 2770, 2962, 4241, 4107, 2718, 3317, 4391, 3263, 2553, 3947, 2710, 2608, 3467, 2796, 2961, 2529, 3320, 2674, 2635, 3446, 3053, 3250, 3688, 1998, 4320, 3351, 2655, 3514, 2779, 3194, 3319, 3224, 3281, 3708, 2807, 3562, 3274, 3374, 3013, 3416, 2981, 3065, 2777, 3469, 2977, 2638, 2972, 3059, 2574, 3380, 4262, 3167, 3368, 2781, 3547, 3386, 1225, 2960, 3485, 3370, 3443, 2824, 3327, 3178, 3006, 3252, 2991, 3470, 2888, 2572, 3418, 2642, 2519, 3363, 40, 2633, 45, 756, 48, 1952, 3122, 2551, 3718, 3484, 3577, 759, 3960, 1378, 2994, 3080, 2589, 3681, 760, 762, 3925, 3654, 60, 4086, 1740, 1660, 62, 1966, 63, 768, 66, 67, 68, 3816, 2599, 2706, 74, 3865, 1549, 1361, 2453, 3882, 3713, 1942, 1312, 4501, 76, 1560, 4289, 3757, 3593, 3908, 4397, 4415, 3723, 3754, 4360, 3945, 2854, 3523, 3669, 4065, 1294, 1484, 3891, 4456, 4040, 4496, 1982, 2001, 1478, 1189, 1490, 1885, 1926, 89, 1180, 92, 786, 94, 95, 1831, 1867, 4458, 97, 1970, 1936, 1590, 99, 789, 790, 1298, 101, 1688, 791, 792, 2007, 103, 104, 105, 108, 1579, 110, 1906, 1444, 1344, 116, 802, 117, 118, 121, 803, 1463, 124, 807, 133, 1978, 812, 135, 136, 137, 138, 140, 1326, 141, 142, 143, 1634, 1302, 817, 818, 147, 148, 149, 151, 154, 155, 819, 820, 157, 165, 822, 168, 169, 170, 823, 1651, 173, 1483, 174, 825, 176, 180, 827, 181, 828, 184, 185, 186, 188, 189, 830, 192, 193, 194, 196, 1391, 197, 200, 201, 202, 203, 205, 832, 206, 834, 835, 836, 1334, 3901, 3312, 2649, 1450, 4386, 3028, 1446, 215, 1522, 3490, 217, 219, 1612, 220, 221, 222, 839, 223, 840, 224, 230, 231, 842, 232, 233, 235, 851, 853, 1536, 240, 242, 243, 244, 245, 246, 247, 250, 251, 254, 255, 857, 256, 258, 259, 859, 260, 861, 862, 2326, 264, 1241, 266, 1477, 867, 869, 870, 271, 871, 872, 272, 1252, 1591, 275, 1980, 276, 876, 877, 277, 278, 1892, 1539, 3601, 3877, 1930, 1460, 282, 1799, 1626, 1374, 1620, 1290, 1354, 1956, 889, 292, 4324, 4138, 891, 3903, 297, 3829, 3809, 4271, 3844, 1436, 1617, 1961, 304, 1589, 4370, 3646, 4059, 1431, 1331, 312, 1779, 313, 896, 1558, 1552, 322, 1958, 324, 901, 1491, 329, 330, 4484, 1756, 3536, 2701, 2799, 3332, 3294, 3159, 3069, 2637, 3025, 2782, 3247, 3350, 2692, 2586, 3004, 3049, 2694, 2650, 3554, 2983, 3403, 3214, 3163, 2541, 3090, 3097, 3462, 1430, 2941, 3486, 2842, 3558, 3104, 3037, 3419, 2780, 2931, 1276, 2928, 2609, 3068, 3128, 2548, 2538, 2618, 2789, 3228, 2657, 3189, 2863, 3307, 3300, 2546, 3048, 3543, 2946, 2975, 3346, 3067, 2728, 2955, 3408, 3027, 3094, 3203, 2988, 2751, 2953, 2566, 2578, 2823, 3063, 3335, 3000, 3181, 3011, 3138, 3389, 2805, 3074, 2894, 3149, 2560, 3417, 3265, 3378, 2901, 2837, 2822, 2745, 3473, 3530, 3040, 2597, 3509, 3522, 3161, 2926, 3209, 3105, 3400, 2630, 2905, 2671, 2818, 2806, 2702, 2709, 3549, 3538, 2534, 2773, 2623, 3491, 3243, 3136, 2693, 3164, 3343, 2918, 2555, 2794, 2679, 3510, 3110, 2672, 3442, 2929, 3184, 3488, 3093, 2996, 3141, 3544, 3102, 2856, 2957, 3466, 3461, 2788, 2660, 3344, 3204, 2720, 3379, 2826, 1789, 2785, 3249, 3527, 4460, 3352, 2569, 4457, 2011, 4319, 3906, 1533, 1755, 4248, 1557, 1602, 4188, 1330, 4349, 3337, 3533, 2629, 3038, 2539, 3567, 3291, 3348, 3115, 3359, 2993, 3079, 3506, 2527, 2963, 2938, 2516, 3113, 2639, 3143, 3044, 2747, 3154, 3280, 3039, 2743, 2902, 3056, 2554, 2522, 3103, 3210, 3434, 2656, 4251, 4196, 3206, 3328, 2588, 3553, 2714, 3078, 3222, 3137, 3357, 2717, 2944, 3012, 3220, 3202, 2811, 3083, 3269, 3566, 2699, 2515, 3023, 2533, 3288, 3075, 3005, 2685, 3058, 2976, 2622, 3333, 3463, 2939, 3521, 3268, 3117, 2626, 2616, 3240, 2570, 3565, 2919, 3157, 2849, 3444, 2631, 3420, 2659, 3325, 3186, 2920, 3258, 3440, 3457, 3310, 2761, 3134, 2621, 3531, 2711, 2774, 2867, 2585, 3155, 2620, 3156, 2844, 3126, 3160, 2909, 3542, 3225, 2887, 3474, 3218, 2744, 2896, 3135, 3424, 3498, 3529, 2661, 2667, 2549, 2819, 2768, 2935, 3182, 2772, 3230, 3043, 2922, 3581, 2869, 2610, 3298, 2775, 3108, 2603, 2612, 2860, 3187, 3238, 3786, 4385, 3016, 3436, 2876, 2987, 3532, 3438, 3561, 3259, 2663, 2890, 3433, 3071, 3018, 2580, 2755, 3015, 2540, 3398, 2664, 2583, 2830, 2644, 2641, 3513, 2725, 2723, 3338, 3556, 2866, 2514, 2932, 2753, 2862, 2899, 2605, 2989, 3096, 3124, 2985, 2716, 3145, 3017, 2591, 2640, 3033, 3216, 3316, 3412, 2971, 3256, 3153, 3575, 3339, 2915, 2531, 3552, 3475, 3060, 3375, 2756, 3382, 2847, 2859, 3251, 3702, 3423, 2537, 2801, 3076, 2696, 3092, 3459, 3144, 3441, 2802, 3479, 2907, 3512, 3518, 3021, 2871, 3032, 2647, 2945, 3045, 2763, 3313, 3034, 3315, 3541, 2746, 2669, 2524, 3003, 2732, 3166, 3046, 3306, 2873, 3364, 3253, 3215, 3061, 2804, 2722, 2964, 2990, 2836, 3173, 2762, 3737, 2628, 3507, 2564, 3031, 2872, 3360, 2658, 2930, 2904, 3244, 3217, 3311, 3445, 2840, 3372, 2958, 3098, 3356, 3456, 3388, 2624, 3207, 2576, 2742, 2665, 2815, 3052, 3421, 2593, 3242, 2535, 2966, 2898, 2858, 2943, 2668, 2798, 3196, 2528, 2713, 3001, 2691, 2948, 2767, 2544, 3302, 2734, 2893, 2592, 2861, 3502, 2969, 2582, 3229, 2676, 2545, 3255, 3330, 2547, 3257, 2882, 3151, 3088, 2883, 3318, 2645, 2733, 2587, 3500, 3008, 2715, 2845, 3183, 2654, 3233, 3267, 2741, 2827, 2704, 3091, 2832, 2736, 3177, 3271, 2835, 2908, 3176, 2947, 3292, 3191, 2517, 3026, 3082, 3392, 3381, 2584, 2712, 3213, 3451, 2634, 3150, 2810, 3303, 2573, 3460, 2615, 3394, 2828, 3329, 4377, 4499, 3555, 2974, 3629, 3578, 3885, 2817, 3248, 2954, 3334, 3571, 3345, 3551, 3384, 3422, 2530, 2973, 4418, 4081, 3951, 1764, 1671, 1843, 3449, 3185, 3399, 2786, 3055, 3472, 3397, 2601, 3564, 3277, 4373, 3548, 3179, 3407, 3841, 3347, 3142, 4431, 3241, 3077, 2700, 3147, 2648, 3283, 2829, 3278, 2581, 2536, 4363, 2848, 3410, 2797, 2523, 2520, 2721, 3496, 2571, 3198, 3219, 3030, 2673, 2921, 3301, 3322, 2705, 3239, 2949, 3369, 3396, 2892, 2897, 2766, 3174, 3297, 2550, 2889, 2933, 2793, 2627, 2677, 3119, 2596, 3226, 3172, 3089, 2868, 2839, 3120, 3286, 2843, 3465, 3946, 4222, 2682, 2865, 3539, 3168, 2864, 3308, 3557, 2940, 3109, 3503, 2625, 3455, 3114, 2595, 3331, 2978, 2518, 2521, 4079, 3024, 3573, 2952, 2653, 3180, 2813, 2652, 2600, 2816, 3201, 3188, 3270, 2997, 2992, 3009, 3520, 2936, 3275, 3165, 3447, 3131, 3305, 2809, 2792, 2729, 2814, 2619, 3266, 2825, 3066, 2857, 2998, 3064, 2681, 3035, 3279, 2764, 3480, 3127, 2912, 3010, 2607, 3211, 3111, 3041, 4269, 3487, 3489, 3019, 1266, 3435, 3482, 3020, 2748, 2646, 2787, 2760, 2563, 3085, 3133, 3158, 3170, 2703, 3494, 2552, 3395, 3245, 3404, 2675, 2791, 1911, 908, 1935, 2749, 3341, 3355, 2575, 2942, 2886, 2758, 2594, 3495, 2884, 3516, 3042, 2737, 2923, 3563, 2855, 3476, 2611, 2937, 3383, 3497, 3402, 3162, 2662, 2875, 3223, 2878, 1808, 3285, 2757, 3057, 2951, 3519, 2579, 2853, 3387, 3401, 3493, 3393, 1608, 3365, 2885, 3574, 3081, 3007, 3568, 3152, 3367, 3358, 336, 3468, 3290, 3550, 3132, 2726, 2879, 3190, 3309, 2613, 2765, 3106, 1355, 3454, 2851, 2881, 3232, 3458, 3326, 3353, 2927, 3212, 2950, 3376, 3208, 3062, 3612, 3195, 3385, 2686, 2602, 3569, 3123, 2727, 1622, 2821, 2636, 2750, 2850, 3050, 2925, 3336, 3540, 2689, 3139, 2526, 3361, 3022, 3427, 3107, 3140, 3371, 3276, 2831, 3501, 2924, 3366, 3199, 3101, 3321, 3499, 2917, 2683, 2800, 2812, 3340, 3227, 3148, 3657, 4446, 1746, 1464, 1886, 2666, 3246, 3130, 3560, 3236, 2730, 3572, 3689, 2968, 1457, 3450, 2577, 2567, 2532, 3415, 2934, 2984, 2568, 4147, 3002, 2986, 2979, 2542, 1762, 4472, 1529, 4057, 1976, 4507, 1583, 1711, 2013, 1594, 4440, 344, 921, 4498, 3728, 3637, 3570, 3429, 4091, 2870, 2995, 4338, 3205, 2880, 3261, 3968, 4291, 4204, 4071, 4034, 1742, 2820, 3912, 3287, 4145, 354, 1782, 927, 3610, 4224, 1918, 1959, 3736, 1770, 931, 4155, 364, 1279, 365, 1543, 367, 4049, 1633, 1722, 369, 1495, 1566, 1211, 1748, 4142, 1434, 1358, 1191, 3732, 4110, 4039, 4411, 4506, 4156, 4036, 4030, 4016, 3899, 1247, 1855, 3919, 1244, 4140, 3930, 4117, 4189, 4001, 3643, 3619, 1240, 1575, 3871, 4135, 4408, 3604, 1274, 3741, 1938, 3709, 3622, 3834, 1983, 1743, 3979, 4461, 4113, 3817, 4232, 4214, 1219, 1486, 1512, 1516, 4047, 4082, 4094, 1574, 1248, 4078, 1872, 1426, 3785, 3687, 4318, 4243, 3866, 3704, 4172, 1513, 1856, 3324, 2769, 2678, 1561, 3296, 377, 1395, 4093, 4453, 3778, 4210, 4009, 4264, 4339, 1738, 4194, 4474, 4013, 4266, 1771, 3860, 3832, 1349, 1381, 3663, 1185, 3932, 3858, 1198, 4192, 3611, 1919, 3790, 3712, 4095, 1887, 4468, 1720, 4247, 2002, 1657, 1336, 3894, 1554, 3576, 4314, 3695, 4362, 1815, 3656, 3638, 4454, 1443, 1661, 1359, 3650, 1648, 3831, 4435, 4451, 1993, 3849, 1718, 4068, 1835, 1425, 1428, 4380, 1658, 1452, 4024, 4072, 3791, 4491, 4323, 4014, 1304, 1511, 1981, 1676, 4422, 3748, 4119, 1297, 1299, 4450, 3990, 4029, 3711, 4344, 1578, 4384, 3892, 3674, 3595, 4405, 3973, 4109, 4159, 3744, 4387, 1960, 4275, 4492, 4365, 4118, 3655, 3886, 4278, 3751, 3678, 4353, 3175, 2970, 1228, 3534, 3437, 3406, 3641, 3639, 4470, 3941, 4348, 3587, 3818, 3814, 4350, 3821, 3929, 3824, 4465, 4494, 1398, 3828, 1284, 3773, 4209, 3014, 3884, 2783, 4038, 3545, 2916, 3112, 2834, 3880, 4399, 4048, 3752, 4207, 1235, 3943, 4355, 4087, 4100, 4163, 4486, 4178, 1643, 4152, 3634, 4445, 4303, 4284, 1213, 4382, 1399, 3714, 4487, 3615, 4018, 4420, 4121, 3724, 4282, 4310, 4488, 4127, 3670, 4052, 4124, 4508, 4500, 3652, 3972, 1309, 1528, 3717, 1217, 2740, 3125, 3546, 3842, 4404, 3690, 3962, 4329, 4410, 3703, 4136, 3589, 3907, 4153, 2707, 4180, 3923, 4444, 4361, 4394, 4302, 3758, 4510, 3742, 1710, 1335, 1997, 1701, 4280, 4006, 1984, 3833, 1593, 2561, 4442, 3900, 4298, 1761, 4388, 1597, 4317, 4249, 1341, 1680, 4441, 3628, 3725, 1945, 937, 4206, 1588, 1439, 3794, 4447, 3776, 3658, 4064, 4011, 4272, 4503, 1367, 3594, 3680, 1300, 1750, 3913, 3774, 1877, 1987, 3998, 1380, 4185, 3686, 3696, 4463, 3853, 4244, 4083, 1909, 3897, 1546, 3613, 3273, 3452, 3525, 1229, 3835, 1234, 3970, 3856, 3586, 1175, 4321, 2778, 4412, 4407, 1810, 3823, 1427, 1507, 1878, 4333, 3146, 4281, 4211, 1179, 3843, 1677, 1524, 1525, 1974, 1239, 4167, 3740, 1342, 4125, 1580, 4060, 1576, 1212, 3921, 1174, 4061, 4021, 3693, 3734, 1382, 3684, 3806, 3635, 3976, 3840, 4286, 3836, 4161, 3659, 3743, 3605, 4392, 4328, 1316, 4173, 4265, 1246, 1629, 1829, 1837, 1914, 1839, 3984, 3910, 4160, 4184, 4132, 4250, 1562, 1847, 1792, 3769, 1534, 4003, 1689, 1599, 1265, 1655, 3874, 4261, 3626, 3579, 1644, 3936, 4054, 4260, 4297, 4357, 4022, 4046, 1222, 1996, 3788, 3953, 4226, 4277, 4101, 3797, 4019, 3771, 3632, 1402, 4137, 3772, 3661, 4186, 4174, 1170, 3850, 1315, 1611, 4033, 3623, 3596, 1461, 1848, 1173, 1928, 1765, 3719, 3584, 3591, 4165, 4191, 3980, 4058, 4200, 4336, 3958, 1260, 4051, 3798, 4032, 1774, 4322, 3991, 4106, 3978, 3965, 4464, 3813, 4154, 1365, 3846, 4345, 4379, 3603, 1693, 3937, 3801, 1787, 1214, 4483, 4201, 1898, 1220, 4245, 1347, 3867, 1900, 3640, 3916, 4089, 3745, 3975, 4256, 4308, 4000, 3868, 4403, 3883, 4326, 4393, 3895, 4237, 3955, 4005, 4092, 4372, 4283, 3805, 4151, 3982, 3597, 3872, 3987, 4490, 3876, 3668, 4300, 1679, 1242, 3598, 3583, 3647, 4304, 3779, 1907, 4042, 3648, 3996, 3800, 4367, 4099, 1807, 3887, 4428, 1625, 1390, 1884, 1682, 4364, 4306, 3869, 1278, 942, 1505, 1542, 1709, 3600, 3914, 3948, 1865, 1716, 3961, 1506, 4221, 1376, 1683, 4276, 1721, 1632, 3607, 1455, 1913, 1497, 1317, 1951, 1778, 3768, 4225, 1668, 390, 4406, 4341, 1480, 1714, 1422, 397, 3618, 4433, 1177, 3898, 398, 950, 400, 1965, 4471, 403, 1482, 3602, 4434, 3721, 1592, 1519, 1352, 4409, 1977, 1631, 1684, 409, 3889, 414, 415, 961, 1905, 416, 963, 3675, 1833, 3974, 965, 970, 1897, 4133, 3830, 972, 424, 427, 1708, 4141, 3749, 1619, 975, 4044, 3590, 1944, 4126, 1923, 1706, 4400, 1606, 2604, 2895, 436, 3448, 1692, 3862, 4055, 4358, 985, 1664, 4045, 3854, 3682, 1972, 2688, 4366, 3425, 3231, 3649, 2759, 2724, 3755, 1216, 3599, 3775, 2754, 2606, 3471, 3234, 2565, 2803, 2562, 2684, 3411, 3405, 2690, 1255, 3694, 3535, 1306, 4084, 3282, 1780, 990, 991, 992, 1728, 994, 1696, 998, 3116, 1869, 456, 1386, 3879, 2698, 1001, 461, 1447, 464, 4425, 1231, 1468, 476, 1273, 1744, 1488, 1659, 1604, 481, 4313, 1499, 1016, 4073, 1777, 4274, 487, 1775, 4205, 1526, 1697, 2000, 1882, 1817, 1880, 490, 1018, 3917, 3616, 4311, 1800, 4473, 4085, 4401, 3783, 3765, 491, 3699, 3792, 4290, 4090, 2012, 1803, 3642, 1322, 502, 1333, 1890, 3608, 1732, 511, 2397, 1864, 1816, 1531, 3636, 1699, 1027, 1366, 4027, 3478, 2959, 3197, 1595, 3413, 518, 1675, 1797, 2315, 1999, 3759, 1215, 4122, 1730, 3966, 3911, 3289, 1821, 530, 1874, 1038, 3767, 1929, 3683, 1338, 1517, 4331, 4332, 4466, 2719, 4123, 4233, 1824, 3129, 3087, 3505, 4158, 4254, 3720, 4351, 4414, 3453, 3254, 1649, 544, 4240, 3580, 1046, 2598, 552, 3819, 1259, 4062, 2841, 3515, 4301, 3738, 1567, 1270, 3857, 1257, 1238, 3662, 561, 1058, 1061, 4203, 1899, 3981, 1062, 1303, 4116, 1946, 3620, 1514, 4002, 3679, 3964, 3707, 3666, 1348, 4273, 1804, 4497, 1401, 4438, 1895, 1264, 1912, 3939, 4170, 4056, 1271, 1521, 1221, 1451, 3934, 4080, 4352, 1700, 3739, 1419, 1811, 3950, 1690, 3716, 1437, 1674, 4337, 1285, 4268, 1183, 3881, 3938, 4198, 4416, 4229, 4292, 4193, 4325, 4375, 4432, 4215, 3944, 1409, 4195, 4223, 1540, 1723, 3750, 4070, 4104, 4235, 1863, 4346, 1881, 1814, 4443, 3761, 1346, 1587, 3592, 576, 4469, 1275, 1950, 4129, 1296, 1551, 3733, 4111, 3993, 4108, 3949, 1287, 1713, 1736, 1995, 1705, 1861, 4120, 4417, 1785, 1236, 4293, 3839, 3983, 4395, 1957, 3928, 4295, 3715, 3855, 3609, 4076, 4175, 3927, 1757, 4299, 1773, 1364, 1462, 4007, 3729, 3665, 3722, 1691, 1624, 1751, 1394, 3924, 3952, 581, 2003, 1559, 1250, 1555, 4114, 1818, 1076, 4448, 1078, 1786, 3354, 1832, 3432, 2891, 1903, 4459, 1563, 591, 594, 598, 1453, 2559, 2590, 2738, 4478, 4069, 1809, 1327, 4150, 3260, 3481, 3672, 3625, 4439, 3852, 3997, 3847, 4050, 3377, 4424, 4143, 4493, 3492, 601, 4017, 4477, 1794, 4263, 3072, 2009, 1754, 1088, 3888, 1368, 3827, 4103, 1571, 1438, 1093, 612, 1094, 3701, 4389, 1332, 1715, 4369, 1652, 1541, 1921, 1733, 1373, 1870, 619, 4218, 1798, 1702, 1384, 3700, 1788, 1600, 624, 2771, 1339, 3875, 3070, 2557, 2795, 2906, 3118, 1614, 1947, 4479, 3766, 635, 1813, 636, 3706, 1110, 640, 1111, 642, 1694, 3431, 2838, 3483, 3464, 3848, 2558, 3314, 3086, 3029, 2956, 3517, 2651, 2914, 2680, 2632, 3121, 3100, 3528, 3526, 3084, 4220, 3304, 2846, 1186, 3235, 2903, 3559, 2687, 3409, 3237, 2900, 2999, 3349, 3171, 2752, 3262, 3504, 3047, 3193, 3430, 2525, 2670, 2911, 3508, 2776, 2697, 3200, 2790, 3323, 2543, 2874, 2614, 3904, 3373, 3054, 2617, 4242, 3621, 2708, 4179, 4398, 3959, 3095, 1286, 3624, 4481, 3511, 2735, 4381, 3295, 1585, 1766, 3221, 2643, 2739, 3920, 2307, 647, 1801, 4279, 3762, 1637, 1509, 1119, 2965, 2695, 3293, 1121, 1122, 3264, 655, 4035, 2910, 3391, 2808, 3099, 2913, 3676, 2852, 3284, 2731, 3994, 1319, 4467, 1623, 664, 1128, 1129, 1130, 670, 1527, 671, 1772, 5005, 1933, 1731, 1793, 3342, 3822, 1601, 3905, 694, 1414, 1795, 1372, 1695, 1866, 4115, 1719, 1920, 1544, 703, 4031, 4305, 1636, 1393, 3810, 4452, 3677, 4227, 4402, 4157, 4197, 1337, 1253, 1532, 4028, 3989, 1493, 1902, 4182, 707, 708, 4476, 714, 1841, 4234, 1314, 4096, 4217, 1627, 1953, 1201, 3787, 3747, 730, 1846, 3815, 1964, 1822, 1262, 4480, 1537, 1291, 1318, 4294, 1582, 3439, 2833, 4287, 4509, 4505, 4267, 3697, 3272, 4112, 2967, 3651, 3705, 1195, 3859, 1164, 1165, 1745, 1973, 1168, 3807, 4307, 1454, or 1781.

[0015] In some aspects, the basic residue is selected from the group consisting of K, R, and H.

[0016] In some aspects, X³ of SEQ ID NO: 5014 is K or R. In some aspects, the 581 to 589 region of the VP capsid polypeptide has a sequence of any one of SEQ ID NOs: 4177, 1289, 740, 741, 18, 745, 3477, 1548, 3051, 2982, 2877, 3036, 3426, 3073, 3169, 747, 3362, 2784, 21, 3192, 23, 1638, 748, 1703, 1836, 3660, 29, 750, 1640, 33, 34, 35, 36, 37, 38, 1205, 3795, 753, 4288, 4219, 2770, 2962, 4241, 4107, 2718, 3317, 4391, 4053, 3263, 2553, 3947, 2710, 2608, 3467, 2796, 2961, 2529, 3320, 2674, 2635, 3446, 3053, 3250, 3688, 1182, 1998, 4320, 3351, 2655, 3514, 2779, 3194, 3319, 3224, 3281, 3708, 2807, 3562, 3274, 3374, 3013, 3416, 2981, 3065, 2777, 3469, 2977, 2638, 2972, 3059, 2574, 3380, 4262, 3167, 3368, 2781, 3547, 3386, 1225, 2960, 3485, 3370, 3443, 2824, 3327, 3178, 3006, 3252, 2991, 3470, 2888, 2572, 3418, 2642, 2519, 3363, 40, 2633, 41, 42, 43, 755, 45, 756, 46, 48, 1952, 758, 49, 3122, 2551, 3718, 3484, 3577, 759, 1230, 3960, 1378, 2994, 3080, 2589, 3681, 760, 53, 3925, 55, 3654, 56, 61, 4086, 1740, 1660, 765, 766, 62, 1966, 63, 64, 768, 771, 65, 66, 67, 68, 3816, 2599, 2706, 74, 3865, 1549, 1361, 3882, 3713, 1942, 1312, 4501, 76, 77, 1560, 4289, 3757, 79, 3593, 4043, 1806, 3908, 4397, 1615, 4415, 3723, 2006, 3754, 1470, 4360, 3945, 2854, 3523, 3669, 82, 4065, 83, 1294, 1484, 3891, 4456, 4040, 4496, 1982, 2001, 1478, 1189, 1490, 1885, 1926, 89, 90, 91, 779, 1180, 92, 785, 786, 94, 95, 1831, 1867, 4458, 97, 1970, 1936, 1590, 100, 789, 790, 1298, 101, 1688, 791, 792, 2007, 103, 794, 795, 104, 105, 106, 1849, 108, 1579, 110, 1906, 113, 1444, 1344, 116, 802, 117, 118, 121, 803, 804, 1463, 805, 122, 124, 125, 127, 807, 132, 809, 810, 133, 1978, 812, 135, 136, 137, 138, 813, 140, 815, 1326, 141, 142, 143, 144, 145, 1634, 1302, 817, 146, 818, 147, 148, 149, 151, 152, 153, 154, 155, 819, 820, 157, 159, 160, 163, 164, 165, 166, 822, 167, 168, 169, 170, 171, 823, 824, 1651, 173, 1483, 174, 175, 825, 176, 177, 826, 827, 181, 828, 182, 829, 184, 185, 186, 187, 188, 189, 830, 191, 192, 193, 194, 195, 196, 1391, 197, 200, 201, 202, 203, 204, 205, 832, 833, 206, 834, 836, 1334, 837, 3901, 3312, 2649, 1301, 211, 212, 1450, 4386, 3028, 213, 1446, 214, 215, 1896, 1522, 3490, 838, 217, 218, 219, 1612, 220, 221, 222, 839, 223, 840, 224, 226, 227, 230, 231, 842, 232, 233, 844, 236, 237, 851, 852, 853, 1536, 240, 854, 242, 243, 244, 245, 246, 247, 249, 250, 251, 252, 253, 254, 255, 857, 256, 257, 258, 259, 858, 859, 260, 261, 860, 861, 862, 262, 264, 1241, 265, 266, 866, 1477, 267, 867, 869, 870, 271, 871, 872, 272, 1252, 273, 1591, 275, 1980, 276, 876, 877, 277, 278, 279, 1892, 1539, 880, 1295, 3601, 3877, 1930, 1420, 1678, 1460, 282, 1799, 283, 1626, 1374, 287, 1620, 1290, 1354, 888, 291, 1956, 889, 292, 4324, 293, 4138, 891, 3903, 297, 3829, 3809, 4271, 3844, 1436, 1515, 1617, 1961, 304, 306, 1589, 4370, 308, 309, 894, 3646, 4059, 1431, 1331, 312, 895, 1779, 313, 314, 315, 316, 896, 1558, 1552, 898, 321, 322, 899, 1958, 901, 325, 902, 326, 1491, 329, 330, 905, 4484, 1756, 3536, 2701, 2799, 3332, 3294, 3159, 3069, 2637, 3025, 2782, 3247, 3350, 2692, 2586, 3004, 3049, 2694, 2650, 3554, 2983, 3403, 3214, 3163, 2541, 3090, 3097, 3462, 1430, 2941, 3486, 2842, 3558, 3104, 3037, 3419, 2780, 2931, 1276, 2928, 2609, 3068, 3128, 2548, 2538, 2618, 2789, 3228, 2657, 3189, 2863, 3307, 3300, 2546, 3048, 3543, 2946, 2975, 3346, 3067, 2728, 2955, 3408, 3027, 3094, 3203, 2988, 2751, 2953, 2566, 2578, 2823, 3063, 3335, 3000, 3181, 3011, 3138, 3389, 2805, 3074, 2894, 3149, 2560, 3417, 3265, 3378, 2901, 2837, 2822, 2745, 3473, 3530, 3040, 2597, 3509, 3522, 3161, 2926, 3209, 3105, 3400, 2630, 2905, 2671, 2818, 2806, 2702, 2709, 3549, 3538, 2534, 2773, 2623, 3491, 3243, 3136, 2693, 3164, 3343, 2918, 2555, 2794, 2679, 3510, 3110, 2672, 3442, 2929, 3184, 3488, 3093, 2996, 3141, 3544, 3102, 2856, 2957, 3466, 3461, 2788, 2660, 3344, 3204, 2720, 3379, 2826, 1789, 2785, 3249, 3527, 4460, 3352, 2569, 4457, 2011, 4319, 3906, 1533, 1755, 1888, 4248, 1557, 1404, 4188, 1330, 4349, 3337, 3533, 2629, 3038, 2539, 3567, 3291, 3348, 3115, 3359, 2993, 3079, 3506, 2527, 2963, 2938, 2516, 3113, 1345, 2639, 3143, 3044, 2747, 3154, 3280, 3039, 2743, 2902, 3056, 2554, 2522, 3103, 3210, 3434, 2656, 4251, 4166, 4196, 3206, 3328, 2588, 3553, 2714, 3078, 3222, 3137, 3357, 2717, 2944, 3012, 3220, 3202, 2811, 3083, 3269, 3566, 2699, 2515, 3023, 2533, 3288, 3075, 3005, 2685, 3058, 2976, 2622, 3333, 3463, 2939, 3521, 3268, 3117, 2626, 2616, 3240, 2570, 3565, 2919, 3157, 2849, 3444, 2631, 3420, 2659, 3325, 3186, 2920, 3258, 3440, 3457, 3310, 2761, 3134, 2621, 3531, 2711, 2774, 2867, 2585, 3155, 2620, 3156, 2844, 3126, 3160, 2909, 3542, 3225, 2887, 3474, 3218, 2744, 2896, 3135, 3424, 3498, 3529, 2661, 2667, 2549, 2819, 2768, 2935, 3182, 2772, 3230, 3043, 2922, 3581, 3524, 2869, 2610, 3298, 2775, 3108, 2603, 3614, 2612, 2860, 3187, 3238, 3786, 4385, 3016, 3436, 2876, 2987, 3532, 3438, 3561, 3259, 2663, 2890, 3433, 3071, 3018, 2580, 2755, 3015, 2540, 3398, 2664, 2583, 2830, 2644, 2641, 3513, 2725, 2723, 3338, 3556, 2866, 2514, 2932, 2753, 2862, 2899, 2605, 2989, 3096, 3124, 2985, 2716, 3145, 3017, 2591, 2640, 3033, 1853, 3216, 3316, 3412, 2971, 3256, 3153, 3575, 3339, 2915, 2531, 3552, 3475, 3060, 3375, 2756, 3382, 2847, 2859, 3251, 3702, 3423, 2537, 2801, 3076, 2696, 3092, 3459, 3144, 3441, 2802, 3479, 2907, 3512, 3518, 3021, 2871, 3032, 2647, 2945, 3045, 2763, 3313, 3034, 3315, 3541, 2746, 2669, 2524, 3003, 2732, 3166, 3046, 3306, 2873, 3364, 3253, 3215, 3061, 2804, 2722, 2964, 2990, 2836, 4098, 4449, 3173, 2762, 3737, 2628, 3507, 2564, 3031, 2872, 3360, 2658, 2930, 2904, 3244, 3217, 3311, 3445, 2840, 3372, 2958, 3098, 3356, 3456, 3388, 2624, 3207, 2576, 2742, 2665, 2815, 3052, 3421, 2593, 3242, 2535, 2966, 2898, 2858, 2943, 2668, 2798, 3196, 2528, 2713, 3001, 2691, 2948, 2767, 2544, 3302, 2734, 2893, 2592, 2861, 3502, 2969, 2582, 3229, 2676, 2545, 3255, 3330, 2547, 3257, 2882, 3151, 3088, 2883, 3318, 2645, 2733, 2587, 3500, 3008, 2715, 2845, 3183, 2654, 3233, 3267, 2741, 2827, 2704, 3091, 2832, 2736, 3177, 3271, 2835, 2908, 3176, 2947, 3292, 3191, 2517, 3026, 3082, 3392, 3381, 2584, 2712, 3213, 3451, 2634, 3150, 2810, 3303, 2573, 3460, 2615, 3394, 2828, 3329, 4377, 4499, 3555, 2974, 3782, 3629, 3578, 3885, 2817, 3248, 2954, 3334, 3571, 3345, 3551, 3384, 3422, 1357, 1844, 2530, 2973, 4418, 4081, 3951, 1764, 1671, 1843, 3449, 3185, 3399, 2786, 3055, 3472, 3397, 2601, 3564, 3277, 4373, 3548, 3179, 3407, 3841, 3347, 3142, 4255, 4431, 3241, 3077, 2700, 3147, 2648, 3283, 2829, 3278, 2581, 2536, 4363, 2848, 3410, 2797, 2523, 2520, 2721, 3496, 2571, 3198, 3219, 3030, 2673, 2921, 3837, 3301, 3322, 2705, 3239, 2949, 3369, 3396, 2892, 2897, 2766, 3174, 3297, 2550, 2889, 2933, 2793, 2627, 2677, 3119, 2596, 3226, 3172, 3089, 2868, 2839, 3942, 3120, 3286, 2843, 3465, 1564, 3946, 4222, 1504, 3999, 2682, 1875, 2865, 3539, 3168, 2864, 3308, 3557, 2940, 3109, 3503, 2625, 3455, 3114, 2595, 3331, 2978, 2518, 2521, 4079, 3024, 3573, 2952, 2653, 1769, 3180, 2813, 2652, 2600, 2816, 3201, 3188, 3270, 2997, 2992, 3009, 3520, 2936, 3275, 3165, 3447, 3131, 3305, 2809, 2792, 2729, 2814, 2619, 3266, 2825, 3066, 2857, 2998, 3064, 2681, 3035, 3279, 2764, 3480, 3127, 2912, 3010, 2607, 3211, 3111, 3041, 1573, 3909, 4269, 3487, 3489, 3019, 335, 1266, 3435, 3482, 3020, 2748, 2646, 2787, 2760, 2563, 3085, 3133, 3158, 3170, 2703, 3494, 2552, 3395, 3245, 3404, 2675, 2791, 1911, 908, 1935, 2749, 3341, 3355, 2575, 2942, 2886, 2758, 2594, 3495, 2884, 3516, 3042, 2737, 2923, 3563, 2855, 3476, 2611, 2937, 3383, 3497, 3402, 3162, 2662, 2875, 3223, 2878, 1808, 3285, 2757, 3057, 2951, 3519, 2579, 2853, 3387, 3401, 3493, 3393, 1608, 3365, 2885, 3574, 3081, 3007, 3568, 3152, 3367, 3358, 336, 3468, 3290, 3550, 3132, 2726, 2879, 3190, 3309, 2613, 2765, 3106, 1355, 3454, 2851, 2881, 3232, 3458, 3326, 3353, 2927, 3212, 2950, 3376, 3208, 3062, 3612, 3195, 3385, 2686, 2602, 3569, 3123, 2727, 1622, 2821, 2636, 2750, 2850, 3050, 2925, 3336, 3540, 2689, 3139, 2526, 3361, 3022, 3427, 3107, 3140, 3371, 3276, 2831, 3501, 2924, 3366, 3199, 3101, 3321, 3499, 2917, 2683, 2800, 2812, 3340, 3227, 3148, 3657, 4446, 1746, 1464, 1886, 2666, 3246, 3130, 3560, 3236, 2730, 3572, 1607, 3689, 2968, 1457, 1500, 909, 337, 1184, 3450, 2577, 2567, 2532, 3415, 2934, 2984, 2568, 4147, 3002, 2986, 2979, 2542, 1762, 4472, 1472, 1529, 4057, 1976, 4507, 1583, 338, 911, 1711, 340, 912, 2013, 341, 4440, 917, 344, 918, 919, 921, 922, 347, 351, 923, 924, 4498, 1518, 3728, 3637, 3570, 3429, 4091, 2870, 2995, 4338, 3205, 2880, 3261, 1994, 3968, 4291, 4204, 4071, 4034, 1742, 2820, 3912, 3287, 4145, 354, 925, 1782, 926, 927, 3610, 357, 359, 4224, 1918, 1959, 3736, 1770, 931, 4155, 364, 1279, 365, 1543, 367, 4049, 1633, 1722, 368, 369, 1495, 1566, 370, 1211, 1873, 4142, 1434, 1358, 1191, 3732, 4110, 4039, 4411, 4506, 4270, 4156, 3780, 4036, 4030, 4016, 1550, 3899, 1247, 1855, 1181, 3919, 1639, 3664, 1244, 4140, 3930, 4117, 4189, 4001, 3799, 3643, 3619, 1240, 1686, 1479, 1307, 1575, 4296, 1665, 3871, 4135, 1605, 4408, 3604, 1274, 3741, 1938, 3709, 1727, 3893, 1280, 3622, 1784, 3834, 1752, 1983, 1743, 3979, 4461, 4113, 3817, 4232, 1340, 1489, 4214, 1219, 1486, 1512, 1481, 1516, 3820, 3789, 4252, 4047, 4330, 4082, 4094, 1574, 1248, 4078, 1872, 1426, 3785, 3687, 4318, 4243, 3866, 3704, 4172, 1621, 4315, 1192, 1513, 1856, 3324, 2769, 2678, 1561, 3296, 377, 1395, 4453, 3940, 3778, 4374, 4210, 4009, 4264, 4339, 4368, 1738, 378, 1610, 4194, 4474, 4013, 4266, 1771, 3860, 3832, 1349, 1381, 3663, 1642, 1185, 4356, 3932, 1233, 4212, 3858, 1198, 4192, 3611, 1919, 1819, 3790, 3712, 1969, 4095, 1887, 4468, 1720, 4247, 2002, 1657, 1663, 1336, 3894, 1554, 1494, 1405, 3576, 4314, 3695, 1851, 4362, 1815, 3845, 4511, 3656, 3638, 1406, 1596, 4454, 1443, 1661, 1359, 1734, 3650, 1910, 1648, 3831, 4435, 1208, 1988, 4451, 1993, 1986, 3849, 1718, 4068, 1835, 1425, 1428, 1282, 4380, 1658, 1452, 1687, 4024, 379, 4072, 3791, 4491, 4323, 4014, 1304, 1440, 1511, 1981, 1676, 1547, 4422, 4450, 3990, 4029, 4097, 3890, 3796, 1389, 3711, 4344, 1578, 1476, 4343, 1202, 4413, 4384, 3808, 1647, 1475, 3892, 3674, 1739, 3926, 3595, 1943, 3756, 4405, 3973, 4109, 4159, 3744, 4387, 1960, 4275, 3781, 1535, 1210, 4492, 4365, 4118, 3655, 3886, 4278, 4383, 4485, 1392, 3751, 3931, 3986, 3678, 1249, 4353, 4208, 3710, 4238, 4213, 3969, 4436, 3175, 4128, 2970, 1228, 3534, 3437, 3406, 3641, 3639, 3954, 4335, 3995, 3582, 4475, 3784, 4470, 4010, 3802, 3941, 4427, 4396, 4348, 3587, 3818, 3864, 3956, 3863, 3731, 3814, 4067, 4354, 4350, 4334, 3821, 1932, 3929, 4171, 1258, 3824, 3631, 4465, 4494, 1320, 1398, 3828, 1204, 1223, 1284, 1685, 3773, 4209, 3014, 4462, 4246, 4190, 4312, 4023, 3760, 3753, 1178, 3884, 2783, 4038, 3545, 2916, 3112, 2834, 3880, 3673, 4102, 4399, 4048, 3752, 4207, 1235, 3943, 4355, 4087, 4100, 4327, 4037, 4163, 3918, 4486, 1243, 3933, 4178, 1662, 1643, 4152, 3634, 3617, 4445, 4303, 1370, 3838, 4199, 4284, 1213, 4382, 1399, 1187, 3714, 1828, 4487, 3615, 1842, 1501, 3746, 4018, 4420, 3606, 4121, 3724, 3935, 1941, 4419, 4282, 1955, 1949, 4310, 4488, 1577, 4127, 1288, 1171, 3670, 4052, 1860, 4124, 4508, 4500, 3652, 3972, 1309, 1630, 1528, 3717, 1217, 3692, 4430, 3764, 4316, 4285, 3645, 3971, 4421, 1172, 4026, 2740, 3125, 3546, 1725, 1206, 3842, 4404, 3690, 3962, 4513, 4340, 4329, 4410, 3703, 4136, 1763, 1487, 3589, 3907, 4153, 2707, 3730, 4426, 4180, 4041, 3923, 4444, 3851, 4429, 4361, 1441, 4394, 4302, 3758, 4510, 3742, 1868, 4077, 1710, 1939, 1335, 1997, 1975, 1701, 4280, 1613, 4006, 1984, 1351, 3653, 3833, 1593, 2561, 4442, 3900, 4298, 1761, 4388, 1820, 1597, 4317, 4249, 1341, 1680, 4441, 3628, 3725, 1945, 4206, 1588, 1439, 3794, 4447, 1838, 3776, 3658, 4064, 1377, 4011, 4272, 4503, 1367, 3594, 3680, 1300, 1750, 3913, 3774, 1877, 1987, 1862, 3998, 1380, 4185, 3686, 3696, 4463, 1350, 4008, 4230, 3853, 4244, 4083, 381, 1909, 3897, 1546, 3613, 3273, 3452, 3525, 1229, 4105, 3835, 383, 1234, 3970, 1492, 3856, 3586, 1175, 4321, 4020, 4144, 1224, 1199, 3667, 2778, 4412, 4407, 1812, 1810, 3823, 1416, 1427, 1507, 1878, 4333, 3146, 4281, 4211, 1179, 3843, 1669, 1677, 1524, 1525, 1974, 384, 1979, 1456, 1239, 4167, 3740, 1876, 1388, 1967, 1474, 385, 1342, 1508, 1580, 4060, 4378, 1576, 1212, 1893, 3921, 3585, 1174, 1396, 4061, 4015, 1207, 3698, 3825, 3922, 4021, 4181, 1598, 1916, 1429, 4502, 4231, 1321, 4390, 3693, 3734, 1382, 3684, 1747, 3806, 3896, 3635, 1768, 4025, 3976, 3840, 3963, 4286, 1502, 3836, 4161, 3659, 3743, 4130, 3605, 1385, 1783, 4392, 4328, 1316, 4173, 4265, 1246, 1985, 1629, 1829, 1737, 1837, 1914, 1839, 1834, 3984, 4495, 3910, 4160, 3671, 4184, 4132, 4250, 1503, 1237, 1523, 1417, 4063, 1562, 3977, 1971, 1707, 1847, 1792, 3769, 4074, 1534, 4239, 4003, 3915, 1689, 1776, 1599, 1265, 1655, 3874, 4261, 3626, 1791, 3579, 1644, 3936, 4054, 4260, 4359, 4131, 4297, 4357, 4022, 3770, 4046, 1222, 1996, 3788, 4169, 1925, 3953, 4228, 4226, 4277, 4101, 1889, 1369, 3797, 4088, 4019, 3771, 3632, 1402, 1520, 1767, 1466, 1194, 4137, 1908, 1927, 1758, 3772, 3661, 4186, 4174, 1170, 3850, 1315, 1611, 1530, 3596, 1461, 1848, 1173, 1928, 1459, 1765, 1826, 3719, 1931, 3584, 4004, 3591, 3967, 4168, 3957, 3878, 4165, 4191, 3980, 4058, 4200, 4336, 3958, 1260, 4051, 3798, 4032, 1774, 4322, 3991, 4106, 1641, 1570, 3978, 3965, 4464, 3813, 4154, 1365, 4257, 3846, 4345, 4379, 3603, 1693, 3937, 3801, 1787, 1214, 4483, 4201, 1898, 4245, 1347, 3867, 1900, 3640, 3916, 4089, 1209, 3745, 3988, 3975, 4236, 4075, 4146, 4256, 4308, 4000, 4148, 3588, 3868, 4403, 3883, 4326, 4393, 3895, 4237, 3955, 3727, 4005, 4092, 4372, 4283, 1553, 3805, 4151, 1281, 1681, 4489, 3982, 4437, 3597, 4342, 3872, 3987, 4490, 3876, 3668, 4300, 1679, 1242, 3598, 3583, 3647, 389, 4304, 3793, 3779, 1937, 1907, 4042, 3648, 3996, 3800, 4367, 4099, 1807, 3887, 4428, 1625, 1390, 1884, 1682, 4364, 4306, 3869, 1278, 1672, 942, 1505, 1542, 1709, 1915, 3600, 3914, 1968, 3948, 1670, 3811, 1865, 1362, 1716, 3961, 1506, 4221, 1376, 1683, 4276, 1445, 1721, 1632, 3607, 1328, 1455, 1913, 1497, 1317, 1951, 1778, 1379, 3768, 4225, 1668, 390, 391, 4406, 4341, 1480, 395, 1714, 1422, 396, 397, 3618, 4433, 1177, 3898, 398, 949, 950, 399, 951, 400, 1965, 4471, 952, 402, 2475, 403, 404, 4139, 1482, 3602, 4434, 3721, 1592, 1519, 1352, 4202, 4409, 1977, 1917, 407, 408, 1631, 1684, 409, 3889, 958, 959, 412, 960, 414, 415, 961, 1905, 416, 963, 417, 3675, 1833, 3974, 420, 421, 965, 966, 969, 970, 422, 1897, 423, 4133, 3830, 972, 424, 973, 427, 1708, 4141, 3749, 431, 1619, 975, 4044, 3590, 1944, 4126, 1923, 1706, 4400, 434, 1606, 979, 2604, 2895, 436, 3448, 1692, 983, 3862, 4055, 4358, 984, 985, 1664, 445, 1972, 2688, 4366, 3425, 3231, 3649, 2759, 2724, 3873, 3755, 1216, 3599, 3775, 2754, 2606, 3471, 3234, 2565, 2803, 2562, 2684, 3411, 3405, 2690, 1255, 3694, 3535, 1306, 4084, 3282, 1780, 987, 988, 990, 451, 452, 991, 992, 1728, 994, 995, 454, 1696, 3116, 1869, 456, 1386, 999, 3879, 2698, 1001, 461, 1447, 462, 464, 4425, 1645, 1231, 1468, 472, 473, 476, 1273, 1007, 1744, 1488, 1659, 477, 1604, 481, 4313, 482, 483, 1499, 484, 1016, 4073, 1777, 1458, 4274, 487, 1775, 4205, 1526, 1697, 1017, 2000, 489, 3917, 3616, 4311, 1800, 4473, 4085, 4401, 1310, 3783, 3765, 491, 1948, 3699, 1735, 3792, 4290, 495, 4090, 496, 2012, 1803, 3642, 1322, 498, 1021, 1022, 502, 1333, 503, 1023, 1890, 510, 1026, 3608, 1732, 511, 2397, 1864, 1816, 1531, 3636, 1699, 1027, 1029, 1366, 2112, 1261, 4027, 3478, 3763, 2959, 517, 3197, 1595, 3413, 1448, 518, 1675, 1797, 520, 1999, 3759, 1215, 4122, 1730, 524, 526, 3966, 3911, 529, 3289, 1821, 530, 531, 1874, 1038, 536, 537, 3767, 1929, 1041, 1042, 3683, 542, 1338, 4331, 4332, 4466, 2719, 3803, 4123, 4233, 1824, 3129, 3087, 3505, 4158, 4254, 1449, 3720, 4351, 4414, 1673, 3453, 3254, 1649, 546, 4240, 3580, 1046, 1047, 550, 2598, 551, 552, 3819, 1259, 4062, 2841, 1050, 3515, 4301, 1052, 1053, 3738, 1567, 1270, 3857, 1055, 1257, 1238, 3662, 561, 562, 1058, 4203, 1899, 3981, 1062, 1303, 4116, 567, 1946, 3620, 1514, 4002, 3679, 3964, 3707, 3666, 1348, 4273, 1804, 4497, 1401, 4438, 1895, 1264, 572, 1912, 3939, 4170, 4056, 1271, 1065, 1521, 1221, 1451, 1654, 3934, 4080, 4352, 1700, 3739, 1565, 1419, 1811, 3950, 1690, 1397, 3716, 1437, 1674, 4337, 1285, 4268, 1183, 3726, 3881, 4134, 4347, 4012, 3938, 4066, 4198, 4416, 4164, 3630, 4229, 4292, 4193, 4325, 4375, 4371, 4432, 4215, 1753, 3944, 1409, 4195, 1729, 4223, 1540, 1723, 1070, 3750, 3633, 4070, 4104, 4162, 4235, 1863, 4346, 1881, 1814, 1572, 4443, 3761, 1346, 1587, 1072, 3592, 576, 1891, 4469, 1275, 1950, 1963, 4129, 1296, 1551, 3733, 4111, 3993, 4108, 3949, 1287, 1713, 1736, 1995, 1435, 1424, 1830, 1705, 1861, 1197, 1254, 4120, 1545, 4417, 1469, 1785, 1236, 4293, 3839, 3983, 4395, 1957, 3928, 4295, 3715, 3855, 3609, 1990, 4076, 4175, 3927, 1757, 1650, 4299, 1773, 2004, 1267, 1364, 1462, 1879, 4007, 3729, 3665, 3722, 1691, 1624, 1751, 1394, 3924, 3952, 580, 581, 2003, 1343, 1559, 1250, 1555, 4114, 1818, 1075, 1076, 1077, 1704, 4448, 1078, 1079, 1786, 585, 3354, 1832, 3432, 2891, 2505, 1903, 1081, 1082, 4459, 1083, 1563, 590, 591, 1085, 594, 1453, 2559, 2590, 2738, 4478, 4069, 1809, 1327, 4150, 3260, 3481, 3672, 3625, 2008, 4439, 3852, 3997, 1411, 599, 3847, 1268, 4050, 3377, 4424, 1496, 4143, 4493, 3492, 1962, 600, 601, 4017, 4477, 1794, 4263, 3072, 2009, 1754, 1087, 1088, 3888, 1368, 3827, 4103, 606, 1090, 1571, 1091, 1438, 1092, 1093, 612, 1094, 3701, 4389, 613, 1603, 1332, 1715, 4369, 1652, 1096, 617, 1541, 618, 1921, 1733, 1373, 1870, 619, 4218, 1798, 1100, 1702, 1101, 1667, 1384, 623, 3700, 1788, 1600, 624, 626, 2771, 627, 1339, 3875, 628, 629, 3070, 4860, 2557, 2795, 2906, 3118, 1614, 1947, 4479, 3766, 632, 1104, 1105, 633, 1813, 636, 3706, 1110, 640, 1111, 641, 642, 1694, 3431, 2838, 3483, 3464, 3848, 2558, 3314, 3086, 3029, 2956, 3517, 2651, 2914, 2680, 2632, 3121, 3100, 3528, 3526, 3084, 4220, 3304, 2846, 1186, 3235, 2903, 3559, 2687, 3409, 3237, 2900, 2999, 3349, 3171, 2752, 3262, 3504, 3047, 4376, 3193, 3430, 2525, 2670, 2911, 3508, 2776, 2697, 3200, 2790, 3323, 2543, 2874, 2614, 3904, 3373, 3054, 2617, 4242, 3621, 2708, 4179, 4398, 3959, 3095, 1286, 3624, 4481, 1432, 3511, 2735, 4381, 3295, 1585, 1114, 1766, 3221, 2643, 2739, 3920, 644, 1116, 645, 646, 647, 1801, 4279, 3762, 1637, 1509, 1119, 2965, 2369, 2695, 3293, 650, 651, 1120, 652, 1121, 3264, 655, 658, 659, 4035, 2910, 3391, 2808, 3099, 2913, 3676, 2852, 3284, 2731, 1609, 3994, 1319, 4467, 1802, 1227, 1623, 662, 663, 664, 1124, 1125, 1128, 1129, 668, 669, 1130, 670, 1131, 1527, 1132, 671, 1772, 1135, 672, 1933, 1731, 1793, 675, 676, 3342, 1138, 1139, 677, 679, 1142, 1143, 681, 1145, 682, 685, 3822, 689, 690, 691, 1147, 1601, 3905, 694, 695, 1414, 1150, 1795, 1372, 1695, 1866, 4115, 1719, 698, 1920, 699, 700, 1544, 4305, 1636, 1393, 2010, 3810, 4452, 3677, 4227, 1277, 1400, 4402, 4157, 4197, 1337, 1253, 1532, 4028, 3989, 1493, 1854, 1902, 1510, 4182, 706, 707, 708, 4476, 1245, 714, 1841, 4234, 1314, 4096, 717, 1155, 4217, 1156, 723, 1157, 1627, 725, 1159, 1953, 1160, 1201, 727, 3787, 3747, 730, 1846, 3815, 2005, 1964, 1822, 1262, 4480, 1537, 1291, 1318, 4294, 1582, 734, 3439, 2833, 4287, 4509, 4505, 4267, 3697, 3272, 4112, 2967, 3651, 1628, 3705, 1195, 3859, 1164, 1165, 1166, 1745, 1973, 1168, 3807, 4307, 1454, or 1781.

[0017] In some aspects, X⁶ of SEQ ID NO: 5014 is K or R. In some aspects, the 581 to 589 region of the VP capsid polypeptide has a sequence of any one of SEQ ID NOs: 738, 4177, 1289, 740, 14, 743, 744, 17, 3477, 1548, 3051, 2982, 2877, 746, 19, 3036, 3426, 3073, 3169, 747, 3362, 2784, 21, 3192, 22, 1638, 748, 24, 749, 27, 1703, 1836, 28, 3660, 29, 750, 1640, 33, 35, 36, 1653, 1205, 3795, 753, 4288, 4219, 2770, 2962, 4241, 4107, 2718, 3317, 4391, 3263, 2553, 3947, 2710, 2608, 3467, 2796, 2961, 2529, 3320, 2674, 2635, 3446, 3053, 3250, 3688, 1998, 4320, 3351, 2655, 3514, 2779, 3194, 3319, 3224, 3281, 3708, 2807, 3562, 3274, 3374, 3013, 3416, 2981, 3065, 2777, 3469, 2977, 2638, 2972, 3059, 2574, 3380, 4262, 3167, 3368, 2781, 3547, 3386, 1225, 2960, 3485, 3370, 3443, 2824, 1467, 3327, 3178, 3006, 3252, 2991, 3470, 2888, 2572, 3418, 2642, 2519, 3363, 40, 2633, 44, 45, 756, 47, 48, 1952, 3122, 2551, 3718, 3484, 3577, 1308, 3960, 1378, 2994, 3080, 2589, 3681, 51, 760, 762, 3925, 3654, 763, 59, 60, 4086, 1740, 1660, 62, 1966, 63, 2438, 768, 66, 67, 68, 3816, 2599, 2706, 72, 73, 74, 3865, 1549, 1361, 3882, 773, 3713, 1942, 1312, 4501, 76, 1413, 775, 1560, 4289, 3757, 3593, 3908, 4397, 4415, 3723, 3754, 4360, 3945, 2854, 3523, 3669, 1356, 4065, 1294, 1484, 85, 86, 3891, 4456, 4040, 4496, 1982, 2001, 1478, 1189, 1490, 1885, 1926, 89, 780, 1180, 92, 781, 782, 783, 786, 94, 95, 788, 1831, 1867, 96, 4458, 97, 1970, 1936, 1590, 98, 99, 789, 790, 1298, 1688, 791, 792, 2007, 102, 103, 104, 105, 107, 108, 1579, 1906, 111, 798, 112, 799, 800, 1444, 801, 114, 115, 1344, 116, 802, 117, 118, 119, 121, 803, 1463, 1760, 806, 126, 128, 807, 129, 131, 808, 133, 1978, 811, 812, 135, 136, 137, 138, 814, 140, 1326, 141, 142, 143, 2344, 816, 1634, 1302, 817, 818, 147, 148, 149, 150, 151, 154, 155, 819, 820, 156, 157, 158, 161, 162, 165, 822, 168, 169, 170, 823, 172, 1651, 173, 1483, 174, 825, 176, 178, 180, 827, 181, 828, 4911, 184, 186, 188, 189, 830, 192, 193, 194, 196, 1391, 198, 199, 200, 201, 202, 203, 205, 832, 206, 834, 207, 208, 209, 210, 835, 836, 1334, 3901, 3312, 2649, 1450, 4386, 3028, 1446, 1522, 3490, 217, 219, 1612, 220, 221, 222, 839, 223, 840, 224, 225, 228, 229, 230, 231, 842, 232, 233, 234, 238, 847, 239, 850, 851, 853, 1536, 240, 241, 242, 243, 244, 245, 247, 250, 251, 254, 255, 857, 256, 258, 259, 859, 260, 861, 862, 864, 263, 2318, 865, 2326, 264, 1241, 266, 1477, 867, 268, 868, 269, 270, 869, 870, 271, 871, 872, 272, 873, 1252, 1591, 875, 274, 275, 276, 876, 877, 277, 278, 280, 1892, 1539, 881, 3601, 3877, 1460, 282, 1799, 284, 1626, 286, 1374, 1620, 1290, 1354, 887, 1956, 889, 292, 4324, 4138, 891, 296, 3903, 297, 3829, 3809, 4271, 3844, 1436, 300, 1617, 1961, 302, 304, 305, 2147, 1589, 4370, 307, 3646, 4059, 1431, 1331, 312, 1779, 313, 896, 1558, 1552, 318, 319, 322, 1958, 323, 324, 901, 1491, 328, 329, 4484, 907, 3536, 2701, 2799, 3332, 3294, 3159, 3069, 2637, 3025, 2782, 3247, 3350, 2692, 2586, 3004, 3049, 2694, 2650, 3554, 2983, 3403, 3214, 3163, 2541, 3090, 3097, 3462, 1430, 2941, 3486, 2842, 3558, 3104, 3037, 3419, 2780, 2931, 1276, 2928, 2609, 3068, 3128, 2548, 2538, 2618, 2789, 3228, 2657, 3189, 2863, 3307, 3300, 2546, 3048, 3543, 2946, 2975, 3346, 3067, 2728, 2955, 3408, 3027, 3094, 3203, 2988, 2751, 2953, 2566, 2578, 2823, 3063, 3335, 3000, 3181, 3011, 3138, 3389, 2805, 3074, 2894, 3149, 2560, 3417, 3265, 3378, 2901, 2837, 2822, 2745, 3473, 3530, 3040, 2597, 3509, 3522, 3161, 2926, 3209, 3105, 3400, 2630, 2905, 2671, 2818, 2806, 2702, 2709, 3549, 3538, 2534, 2773, 2623, 3491, 3243, 3136, 2693, 3164, 3343, 2918, 2555, 2794, 2679, 3510, 3110, 2672, 3442, 2929, 3184, 3488, 3414, 3093, 2996, 3141, 3544, 3102, 2856, 2957, 3466, 3461, 2788, 2660, 3344, 3204, 2720, 3379, 2826, 1789, 2785, 3249, 3527, 4460, 3352, 2569, 4457, 2011, 4319, 3906, 1533, 1755, 4248, 1557, 3804, 1602, 4188, 1330, 4349, 3337, 3533, 2629, 3038, 2539, 3567, 3291, 3348, 3115, 3359, 2993, 3079, 3506, 2527, 2963, 2938, 2516, 3113, 2639, 3143, 3044, 2747, 3154, 3280, 3039, 2743, 2902, 3056, 2554, 2522, 3103, 3210, 3434, 2656, 4251, 2588, 3553, 2714, 3078, 3222, 3137, 3357, 2717, 2944, 3012, 3220, 3202, 2811, 3083, 3269, 3566, 2699, 2515, 3023, 2533, 3288, 3075, 3005, 2685, 3058, 2976, 2622, 3333, 3463, 2939, 3521, 3268, 3117, 2626, 2616, 3240, 2570, 3565, 2919, 3157, 2849, 3444, 2631, 3420, 2659, 3325, 3186, 2920, 3258, 3440, 3457, 3310, 2761, 3134, 2621, 3531, 2711, 2774, 2867, 2585, 3155, 2620, 3156, 2844, 3126, 3160, 2909, 3542, 3225, 2887, 3474, 3218, 2744, 2896, 3135, 3424, 3498, 3529, 2661, 2667, 2549, 2819, 2768, 2935, 3182, 2772, 3230, 3043, 2922, 3581, 2869, 2610, 3298, 2775, 3108, 2603, 2612, 2860, 3187, 3238, 3786, 4385, 3016, 3436, 2876, 2987, 3532, 3438, 3561, 3259, 2663, 2890, 3433, 3071, 3018, 2580, 2755, 3015, 2540, 3398, 2664, 2583, 2830, 2644, 2641, 3513, 2725, 2723, 3338, 3556, 2866, 2514, 2932, 2753, 2862, 2899, 2605, 2989, 3096, 3124, 2985, 2716, 3145, 3017, 2591, 2640, 3033, 3316, 3412, 2971, 3256, 3153, 3575, 3339, 2915, 2531, 3552, 3475, 3060, 3375, 2756, 3382, 2847, 2859, 3251, 3702, 3423, 2537, 2801, 3076, 2696, 3459, 3144, 3441, 2802, 3479, 2907, 3512, 3518, 3021, 2871, 3032, 2647, 2945, 3045, 2763, 3313, 3034, 3315, 3541, 2746, 2669, 2524, 3003, 2732, 3166, 3046, 3306, 2873, 3364, 3253, 3215, 3061, 2804, 2722, 2964, 2990, 2836, 3173, 2762, 3737, 2628, 3507, 2564, 3031, 2872, 3360, 2658, 2930, 2904, 3244, 3217, 3311, 3445, 2840, 3372, 2958, 3098, 3356, 3456, 3388, 2624, 3207, 2576, 2742, 2665, 2815, 3052, 3421, 2593, 3242, 2535, 2966, 2898, 2858, 2943, 2668, 2798, 3196, 2528, 2713, 3001, 2691, 2948, 2767, 2544, 3302, 2734, 2893, 2592, 2861, 3502, 2969, 2582, 3229, 2676, 2545, 3255, 3330, 2547, 3257, 2882, 3151, 3088, 2883, 3318, 2645, 2733, 2587, 3500, 3008, 2715, 2845, 3183, 2654, 3233, 3267, 2741, 2827, 2704, 3091, 2832, 2736, 3177, 3271, 2835, 2908, 3176, 2947, 3292, 3191, 2517, 3026, 3082, 3392, 2584, 2712, 3213, 3451, 2634, 3150, 2810, 3303, 2573, 3460, 2615, 3394, 2828, 3329, 4377, 4499, 3555, 2974, 3629, 3578, 3885, 2817, 3248, 2954, 3334, 3571, 3345, 3551, 3384, 3422, 2530, 2973, 4418, 4081, 3951, 1764, 1671, 1843, 3449, 3185, 3399, 2786, 3055, 3472, 3397, 2601, 3564, 3277, 3548, 3179, 3407, 3841, 3347, 3142, 3241, 3077, 2700, 3147, 2648, 3283, 2829, 3278, 2581, 2536, 4363, 2848, 3410, 2797, 2523, 2520, 2721, 3496, 2571, 3198, 3219, 3030, 2673, 2921, 3301, 3322, 2705, 3239, 2949, 3369, 3396, 2892, 2897, 2766, 3174, 3297, 2550, 2889, 2933, 2793, 2627, 2677, 3119, 2596, 3226, 3172, 3089, 2868, 2839, 3120, 3286, 2843, 3465, 3946, 2682, 2865, 3539, 3168, 2864, 3308, 3557, 2940, 3109, 3503, 2625, 3455, 3114, 2595, 3331, 2978, 2518, 2521, 4079, 3024, 3573, 2952, 2653, 3180, 2813, 2652, 2600, 2816, 3201, 3188, 3270, 2997, 2992, 3009, 3520, 2936, 3275, 3165, 3447, 3131, 3305, 2809, 2792, 2729, 2814, 2619, 3266, 2825, 3066, 2857, 2998, 3064, 2681, 3035, 3279, 2764, 3480, 3127, 2912, 3010, 2607, 3211, 3111, 3041, 4269, 3487, 3489, 3019, 1266, 1415, 2980, 3428, 3435, 3482, 3020, 2748, 2646, 2787, 2760, 2563, 3085, 3133, 3158, 3170, 2703, 3494, 2556, 2552, 3395, 3245, 3404, 2675, 2791, 1911, 908, 1935, 2749, 3341, 3355, 2575, 2942, 2886, 2758, 2594, 3495, 2884, 3516, 3042, 2737, 2923, 3563, 2855, 3476, 2611, 2937, 3383, 3497, 3402, 3162, 2662, 2875, 3223, 2878, 1808, 3285, 2757, 3057, 2951, 3519, 2579, 2853, 3387, 3401, 3493, 3393, 1608, 3365, 2885, 3574, 3081, 3007, 3568, 3152, 3367, 3358, 336, 3468, 3290, 3550, 3132, 2726, 2879, 3190, 3309, 2613, 2765, 3106, 1355, 3454, 2851, 2881, 3232, 3458, 3326, 3353, 2927, 3212, 2950, 3376, 3208, 3062, 3612, 3195, 3385, 2686, 2602, 3569, 3123, 2727, 1622, 2821, 2636, 2750, 2850, 3050, 2925, 3336, 3540, 2689, 3139, 2526, 3361, 3022, 3427, 3107, 3140, 3371, 3276, 2831, 3501, 2924, 3366, 3199, 3101, 3321, 3499, 2917, 2683, 2800, 2812, 3340, 3227, 3148, 3657, 4446, 1464, 1886, 2666, 3246, 3130, 3560, 3236, 2730, 3572, 3689, 2968, 1457, 3450, 2577, 2567, 2532, 3415, 2934, 2984, 2568, 4147, 3002, 2986, 910, 2979, 2542, 1762, 4472, 1529, 4057, 1976, 4507, 1583, 1711, 2013, 1594, 4440, 344, 920, 921, 4498, 3728, 3637, 3570, 3429, 4091, 2870, 2995, 4338, 3205, 2880, 3261, 3968, 4291, 4204, 4071, 4034, 1742, 2820, 3912, 3287, 1218, 1190, 4145, 354, 1782, 927, 3610, 356, 4224, 1918, 1959, 1840, 3736, 1770, 929, 930, 931, 4155, 360, 361, 362, 364, 1279, 365, 1543, 366, 367, 4049, 1633, 1722, 369, 1495, 1566, 373, 1211, 1726, 1442, 1748, 4142, 1434, 1358, 1191, 3732, 4110, 4039, 4506, 4156, 4036, 4030, 4016, 3899, 1247, 1855, 3919, 1244, 4140, 3930, 4117, 4189, 4001, 3643, 3619, 1240, 1575, 3871, 4135, 4408, 3604, 1274, 4149, 3741, 1938, 3709, 3622, 3834, 1983, 1743, 3979, 4461, 4113, 3817, 4232, 4214, 3902, 1219, 1486, 1512, 1516, 4047, 4082, 4094, 1574, 1248, 4078, 1872, 1426, 3687, 4318, 4243, 3866, 3704, 4172, 1856, 3324, 2769, 2678, 1561, 3296, 377, 1395, 1584, 4093, 4453, 4210, 4009, 4264, 4339, 1738, 4474, 4013, 4266, 1771, 1759, 1922, 3860, 3832, 1349, 1381, 3663, 1185, 3932, 3858, 1198, 4192, 3611, 1919, 3790, 3712, 4095, 1887, 4468, 1720, 4247, 934, 1790, 2002, 1657, 1336, 3894, 3576, 4314, 3695, 1850, 4362, 1815, 3638, 4454, 1661, 4504, 1359, 3650, 1305, 1648, 3831, 4435, 4451, 1993, 3849, 1718, 4068, 1835, 1425, 1428, 4380, 1658, 1452, 4024, 4072, 3791, 4491, 4323, 4014, 1304, 1511, 1981, 1676, 4422, 1283, 3861, 3644, 4259, 1418, 1176, 4216, 1421, 3992, 4423, 4253, 3748, 4119, 1297, 1954, 4450, 3711, 4344, 1578, 4384, 3892, 3674, 3595, 4405, 3973, 4109, 4159, 3744, 4387, 4275, 4492, 4365, 4118, 4278, 3751, 3678, 4353, 3175, 2970, 1228, 3534, 3437, 3406, 3641, 4470, 3941, 4348, 3587, 3818, 4350, 3821, 3929, 3824, 4465, 1398, 3828, 1284, 3773, 4209, 3014, 3884, 2783, 4038, 3545, 2916, 3112, 2834, 3880, 4399, 4048, 3752, 4207, 1235, 3943, 4355, 4087, 4100, 4163, 4486, 4178, 1643, 4152, 4445, 4303, 4284, 1213, 4382, 1399, 3714, 4487, 3615, 4018, 4420, 4121, 3724, 4282, 4310, 4488, 4127, 3670, 4052, 3627, 3777, 1371, 3685, 4258, 3812, 1581, 4124, 4508, 4500, 3652, 3972, 1528, 3717, 2740, 3125, 3546, 3842, 4404, 3690, 3962, 4136, 3589, 3907, 4153, 2707, 4180, 3923, 4444, 4361, 4394, 3758, 4510, 3742, 1710, 1407, 4187, 1193, 1188, 1196, 1724, 1717, 1200, 1997, 1701, 4280, 4006, 1984, 3833, 2561, 4442, 3900, 4298, 1761, 4388, 1597, 4317, 4249, 1341, 1203, 1680, 4441, 3628, 3725, 1945, 937, 4206, 1588, 1439, 3794, 4447, 3776, 3658, 4064, 4011, 4272, 4503, 1324, 3594, 3680, 1300, 1750, 3913, 3774, 1877, 1987, 3998, 3686, 3696, 4463, 3853, 4244, 4083, 1909, 3897, 1546, 3613, 3273, 3452, 3525, 1229, 3835, 1234, 3970, 3856, 3586, 1175, 4321, 2778, 4412, 4407, 3823, 1427, 1507, 1878, 4333, 3146, 4281, 4211, 3843, 1677, 1524, 1525, 1974, 1239, 4167, 3740, 1342, 1471, 4176, 1232, 1989, 4125, 1741, 1580, 4060, 1576, 1212, 3921, 1174, 4061, 4021, 3693, 3734, 1382, 3684, 3806, 3635, 3976, 3840, 4286, 3836, 4161, 3659, 3605, 4392, 4328, 1316, 4173, 4265, 1246, 1629, 1829, 3826, 1992, 1656, 1914, 1839, 3984, 3910, 4160, 4184, 4132, 4250, 1792, 3769, 1534, 4003, 1689, 1599, 1265, 1410, 1823, 1498, 1329, 386, 940, 1655, 3874, 4261, 3626, 3579, 1644, 3936, 4054, 4260, 4297, 4357, 4022, 4046, 1222, 1996, 3788, 3953, 4226, 4277, 4101, 3797, 4019, 3771, 3632, 1402, 4137, 3772, 3661, 4186, 4174, 1170, 3850, 1315, 1611, 1859, 4183, 1403, 4033, 3623, 3596, 1461, 1848, 1173, 1928, 1765, 3719, 3584, 4165, 4191, 3980, 4058, 4200, 4336, 3958, 1260, 4051, 3798, 4032, 1774, 4322, 3991, 4106, 3978, 3965, 4464, 3813, 4154, 1365, 3846, 4345, 4379, 3603, 3937, 3801, 1787, 1214, 4483, 4201, 1845, 1220, 4245, 1347, 3867, 1900, 3640, 3916, 4089, 3745, 3975, 4256, 4308, 4000, 3868, 4403, 3883, 4326, 4393, 3895, 4237, 3955, 4005, 4092, 4372, 4283, 3805, 4151, 3982, 3597, 3872, 3987, 4490, 3876, 3668, 4300, 1679, 1242, 3598, 3583, 3647, 4304, 3779, 1907, 4042, 3648, 3996, 3800, 4367, 4099, 1807, 3887, 4428, 1625, 1390, 1884, 1682, 4364, 4306, 3869, 1278, 942, 1505, 1709, 3600, 3914, 3948, 1865, 1716, 3961, 1506, 4221, 1376, 1683, 4276, 1721, 1632, 3607, 1455, 1913, 1497, 1317, 1951, 1778, 3768, 4225, 1668, 390, 4406, 4341, 1480, 1714, 1422, 397, 3618, 4433, 1177, 3898, 398, 950, 400, 1965, 4471, 953, 401, 403, 955, 1482, 3602, 4434, 3721, 1592, 1825, 1698, 1519, 1352, 4409, 1977, 405, 1631, 1684, 409, 3889, 2117, 411, 413, 414, 415, 961, 1905, 416, 963, 3675, 1833, 3974, 965, 970, 1897, 1272, 4133, 3830, 972, 424, 427, 1708, 4141, 3749, 1619, 975, 4044, 3590, 1944, 4126, 1923, 1706, 432, 976, 978, 4400, 1606, 980, 2604, 2895, 436, 3448, 2188, 438, 1692, 442, 3862, 4055, 4358, 2276, 985, 1664, 443, 4309, 4045, 3854, 3682, 1972, 2688, 4366, 3425, 3231, 3649, 2759, 2724, 3755, 1216, 3599, 3775, 2754, 2606, 3471, 3234, 2565, 2803, 2562, 2684, 3411, 3405, 2690, 1255, 3694, 3985, 3535, 1306, 4084, 3282, 1780, 448, 990, 991, 1485, 992, 1728, 993, 994, 1696, 997, 3116, 1869, 456, 1386, 1000, 3879, 2698, 460, 1001, 461, 1447, 1002, 1003, 463, 464, 4425, 465, 1004, 466, 469, 1231, 1468, 470, 1005, 476, 1273, 1744, 1488, 1659, 1604, 479, 1013, 1014, 481, 4313, 1499, 1016, 4073, 1777, 485, 4274, 487, 1775, 4205, 1526, 1697, 2000, 488, 1894, 1882, 1817, 1880, 490, 1018, 3917, 3616, 4311, 4473, 4085, 4401, 3783, 3765, 1538, 3870, 491, 3699, 3792, 4290, 494, 2421, 4090, 2012, 1803, 3642, 1322, 1020, 502, 1333, 504, 1890, 507, 3608, 1732, 1864, 1816, 1531, 513, 3636, 514, 1699, 1027, 1366, 4950, 4027, 3478, 2959, 1293, 3197, 1595, 3413, 518, 1032, 1033, 1675, 1797, 2315, 521, 1999, 3759, 1215, 4122, 1730, 3966, 1035, 4973, 528, 3911, 3289, 1821, 530, 532, 1874, 533, 1038, 538, 539, 3767, 1929, 3683, 1338, 1616, 1901, 1796, 1517, 4331, 4332, 4466, 2719, 4123, 4233, 1824, 3129, 3087, 3505, 4158, 4254, 3720, 4351, 4414, 3453, 3254, 1649, 544, 4240, 3580, 1046, 548, 549, 2598, 552, 553, 3819, 1259, 4062, 554, 2841, 3515, 1433, 1323, 4301, 555, 558, 3738, 1567, 559, 1054, 1270, 3857, 2175, 1257, 1238, 3662, 561, 1058, 563, 1061, 4203, 1899, 3981, 1062, 1303, 4116, 1946, 3620, 1514, 4002, 3679, 3964, 3707, 3666, 1348, 4273, 1804, 4497, 1401, 4438, 1895, 1264, 1912, 573, 3939, 4170, 4056, 1271, 1521, 1221, 1451, 3934, 4080, 4352, 1700, 3739, 1419, 1811, 3950, 1690, 3716, 1569, 1437, 1674, 4337, 1285, 4268, 1183, 3881, 3938, 4198, 4416, 4229, 4292, 4193, 4325, 4375, 4432, 4215, 3944, 4195, 4223, 1540, 4455, 4512, 1723, 3750, 4070, 4104, 4235, 1863, 4346, 1881, 1814, 4443, 3761, 1587, 3592, 576, 4469, 1275, 1950, 4129, 1296, 1551, 3733, 4111, 3993, 4108, 1287, 1713, 1556, 1736, 1995, 1705, 1861, 4120, 4417, 1785, 1236, 4293, 1827, 3839, 3983, 4395, 1957, 3928, 4295, 3715, 3855, 3609, 4076, 4175, 3927, 1757, 4299, 1773, 1364, 1462, 4007, 3729, 3665, 3722, 1691, 1712, 1624, 1751, 1394, 3924, 3952, 581, 2003, 1559, 1250, 1555, 4114, 1818, 1076, 4448, 1078, 1786, 3354, 1832, 3432, 2891, 1903, 4459, 589, 1563, 1084, 591, 592, 594, 595, 1858, 596, 1453, 2559, 2590, 2738, 4478, 4069, 1809, 1327, 4150, 3260, 3481, 3672, 3625, 4439, 3852, 3997, 3847, 4050, 3377, 4424, 4143, 4493, 3492, 1412, 4017, 4477, 1794, 602, 4263, 3072, 2009, 1754, 3888, 603, 604, 1368, 3827, 4103, 1571, 1438, 611, 1093, 612, 1094, 3701, 4389, 614, 615, 1332, 1715, 4369, 1652, 1541, 1921, 1733, 1373, 1870, 619, 4218, 1798, 1702, 1384, 3700, 1788, 1600, 624, 2473, 1423, 2771, 1339, 3875, 3070, 2015, 2557, 2795, 2906, 2103, 3299, 3118, 4576, 1103, 1614, 1947, 631, 4479, 3766, 1107, 635, 1813, 636, 2431, 637, 1109, 639, 3706, 1110, 640, 642, 3735, 3390, 1694, 3431, 2838, 3483, 3464, 3848, 2558, 3314, 3086, 3029, 2956, 3517, 2651, 2914, 2680, 2632, 3121, 3100, 3528, 3526, 3084, 4220, 3304, 2846, 1186, 3235, 2903, 3559, 2687, 3409, 3237, 2900, 2999, 3349, 3171, 2752, 3262, 3504, 3047, 3193, 3430, 2525, 2670, 2911, 3508, 2776, 2697, 3200, 2790, 3323, 2543, 2874, 2614, 3904, 3373, 3054, 2617, 4242, 3621, 2708, 4179, 4398, 3959, 1269, 3095, 1286, 3624, 4481, 3511, 2735, 4381, 3295, 1568, 1766, 3221, 2643, 2739, 3920, 647, 1801, 4279, 3762, 1637, 1509, 648, 1117, 1119, 2965, 2695, 3293, 4722, 1121, 653, 1122, 3264, 655, 656, 657, 4035, 2910, 3391, 2808, 3099, 2913, 3676, 2852, 3284, 2731, 3537, 3994, 1319, 4467, 1623, 660, 1123, 664, 1126, 1128, 1129, 1130, 670, 1527, 671, 1772, 1137, 5005, 1933, 1731, 1793, 3342, 1140, 1141, 687, 3822, 1601, 1148, 693, 3905, 694, 1414, 1149, 697, 1795, 1372, 1695, 1866, 1151, 4115, 1719, 1920, 4999, 1544, 703, 4031, 4305, 1636, 3810, 4452, 3677, 4227, 4402, 4157, 4197, 1337, 1253, 4028, 3989, 704, 1493, 1902, 1152, 4182, 707, 708, 709, 4476, 1375, 713, 714, 1841, 4234, 1154, 1314, 4096, 718, 719, 720, 2063, 1311, 721, 4217, 1627, 1158, 1953, 1201, 3787, 729, 3747, 730, 1846, 3815, 1964, 1822, 1262, 4480, 1537, 1291, 1318, 4294, 1582, 3439, 2833, 4287, 4509, 4505, 4267, 3697, 3272, 4112, 2967, 3651, 1805, 3705, 1195, 3859, 1164, 1165, 2351, 2423, 1745, 1973, 3807, 4307, 1169, 1454, or 1781.

[0018] In some aspects, (a) X³ of SEQ ID NO: 5014 is not D, (b) X⁶ of SEQ ID NO: 5014 is not D, or (c) X³ of SEQ ID NO: 5014 is not D and X⁶ of SEQ ID NO: 5014 is not D. In some aspects, the 581 to 589 region of the VP capsid polypeptide has a sequence of any one of SEQ ID NOs: 738, 739, 4177, 1289, 740, 14, 15, 741, 742, 743, 16, 744, 17, 18, 745, 3477, 1548, 3051, 2982, 2171, 2877, 746, 19, 20, 3036, 3426, 3073, 3169, 747, 2406, 3362, 2784, 2469, 4889, 21, 3192, 4942, 22, 23, 1638, 748, 24, 25, 749, 26, 27, 1703, 1836, 28, 2038, 2301, 3660, 29, 750, 30, 31, 32, 2095, 1640, 33, 34, 35, 36, 37, 4742, 2450, 38, 4925, 39, 751, 752, 2144, 1653, 1205, 3795, 753, 4288, 4219, 2770, 2962, 4241, 4107, 2718, 3317, 4391, 4053, 3263, 2553, 3947, 2710, 2608, 3467, 2796, 2961, 2529, 3320, 2674, 2635, 3446, 3053, 3250, 3688, 1182, 1998, 4320, 3351, 2655, 3514, 2779, 3194, 3319, 3224, 3281, 3708, 2807, 3562, 3274, 3374, 3013, 3416, 2981, 3065, 2777, 3469, 2977, 2638, 2972, 3059, 2574, 3380, 4262, 3167, 3368, 2781, 3547, 3386, 1225, 2960, 3485, 3370, 3443, 2824, 754, 1467, 3327, 3178, 3006, 3252, 2991, 3470, 2888, 2572, 3418, 2642, 2519, 3363, 40, 2633, 41, 42, 43, 755, 2511, 44, 45, 756, 46, 757, 47, 48, 1952, 758, 2341, 2410, 49, 3122, 2551, 3718, 4806, 2216, 3484, 3577, 759, 2080, 2072, 2034, 50, 1308, 1230, 3960, 1378, 2994, 3080, 2589, 3681, 51, 2167, 52, 760, 53, 2389, 4755, 761, 4591, 762, 4659, 54, 2146, 3925, 55, 3654, 2087, 2346, 4766, 4682, 4984, 4744, 56, 763, 764, 4626, 4702, 57, 58, 59, 60, 61, 4086, 1740, 1660, 765, 766, 62, 1966, 2032, 2499, 2332, 767, 63, 2096, 2181, 4913, 2438, 2041, 64, 768, 769, 770, 2384, 2402, 771, 65, 66, 2111, 67, 772, 2458, 2197, 68, 3816, 69, 2599, 2706, 2497, 70, 2399, 71, 4769, 2366, 72, 73, 74, 3865, 1549, 1361, 2453, 3882, 773, 3713, 1942, 2140, 75, 1312, 4501, 76, 77, 774, 1413, 775, 776, 78, 1560, 4289, 3757, 79, 3593, 4043, 1806, 3908, 4397, 1615, 4415, 3723, 2006, 3754, 1470, 4360, 80, 3945, 2854, 3523, 3669, 1356, 777, 2379, 81, 82, 4065, 83, 84, 2030, 1294, 2413, 2064, 1484, 2299, 85, 4594, 86, 778, 87, 3891, 4456, 4040, 4496, 1982, 2001, 1478, 1189, 88, 1490, 1885, 1926, 89, 90, 91, 779, 2270, 780, 2161, 1180, 92, 781, 782, 783, 93, 2356, 784, 785, 786, 94, 95, 788, 1831, 1867, 96, 4458, 97, 1970, 4656, 2173, 1936, 2349, 1590, 98, 99, 100, 789, 790, 1298, 101, 1688, 791, 792, 2007, 4556, 2070, 102, 793, 4632, 103, 794, 795, 104, 105, 106, 2229, 796, 4980, 4691, 107, 2440, 1849, 108, 2014, 797, 4736, 2509, 2018, 2227, 4787, 1579, 110, 1906, 111, 2428, 798, 2075, 112, 2411, 113, 2359, 799, 4848, 800, 2461, 1444, 2313, 2350, 4579, 4821, 801, 114, 2329, 4864, 4834, 115, 1344, 116, 802, 117, 118, 119, 4929, 4677, 120, 4791, 2158, 121, 803, 804, 1463, 805, 122, 2139, 2290, 1760, 2465, 123, 2424, 2058, 2230, 124, 4717, 806, 125, 126, 2370, 127, 4521, 128, 4971, 4994, 807, 2085, 4533, 129, 130, 131, 132, 4933, 808, 2336, 2026, 2204, 809, 810, 2281, 133, 1978, 134, 811, 812, 135, 136, 137, 138, 813, 814, 139, 4673, 140, 815, 1326, 141, 142, 143, 2344, 4544, 5009, 144, 145, 816, 4654, 2125, 4663, 4810, 4816, 1634, 1302, 817, 146, 818, 147, 148, 149, 4546, 150, 151, 152, 153, 154, 155, 819, 820, 156, 2149, 157, 2295, 821, 158, 159, 160, 161, 4631, 2441, 162, 163, 164, 165, 166, 822, 167, 168, 169, 170, 171, 823, 172, 4613, 824, 1651, 173, 1483, 174, 175, 825, 176, 177, 178, 179, 4624, 2170, 4809, 4520, 180, 826, 827, 181, 828, 4695, 2130, 4911, 182, 4582, 4873, 2189, 183, 4641, 829, 184, 185, 2244, 4647, 186, 187, 188, 189, 190, 2114, 830, 191, 192, 193, 194, 2071, 4615, 2361, 195, 4852, 2187, 4914, 4947, 196, 1391, 197, 4534, 4726, 4788, 198, 199, 831, 2240, 2223, 200, 201, 202, 203, 2106, 2503, 4775, 204, 205, 832, 833, 206, 834, 2232, 2294, 207, 2166, 208, 209, 210, 835, 836, 1334, 837, 3901, 3312, 2649, 1301, 211, 212, 1450, 4386, 3028, 213, 1446, 214, 2206, 215, 1896, 1522, 3490, 838, 216, 2090, 2241, 217, 218, 4653, 219, 1612, 220, 221, 222, 839, 223, 4974, 4790, 4915, 2464, 4567, 4774, 4964, 2360, 840, 224, 4928, 4741, 225, 2088, 4751, 226, 227, 4890, 4519, 4883, 228, 4786, 229, 230, 231, 2393, 2448, 841, 842, 232, 233, 4782, 234, 2269, 843, 235, 844, 236, 237, 4930, 845, 846, 238, 847, 239, 848, 849, 2150, 850, 851, 852, 853, 1536, 240, 854, 241, 242, 243, 244, 245, 246, 247, 248, 4696, 855, 4634, 856, 249, 250, 251, 252, 253, 254, 255, 857, 2115, 4880, 2218, 256, 257, 258, 259, 858, 859, 260, 261, 860, 861, 862, 262, 4966, 863, 864, 263, 4749, 4970, 2296, 2318, 4535, 865, 2326, 264, 1241, 265, 266, 866, 1477, 267, 867, 4977, 268, 868, 269, 4668, 5002, 270, 869, 870, 271, 871, 872, 272, 4822, 4709, 873, 4655, 4972, 2392, 2317, 874, 1252, 273, 1591, 4975, 875, 274, 2025, 275, 1980, 276, 876, 877, 2066, 277, 278, 279, 4670, 280, 2323, 2288, 2334, 4939, 4689, 281, 878, 2416, 1892, 879, 1539, 2214, 2215, 880, 2327, 881, 882, 4601, 883, 1295, 3601, 3877, 1930, 1420, 1678, 1460, 2306, 884, 282, 1799, 283, 284, 4988, 4871, 4553, 4772, 4817, 2260, 1626, 2082, 885, 286, 1374, 886, 2119, 2504, 2468, 287, 1620, 1290, 2425, 2482, 4564, 4671, 2282, 288, 2354, 1354, 2033, 289, 887, 290, 888, 291, 1956, 2362, 2467, 889, 2357, 4547, 4765, 292, 4794, 2391, 4324, 293, 890, 294, 295, 4138, 891, 2297, 2254, 296, 2224, 3903, 297, 892, 3829, 298, 299, 3809, 4271, 3844, 1436, 300, 1515, 1617, 301, 1961, 4649, 5010, 302, 2060, 303, 304, 305, 2452, 2147, 4574, 4538, 306, 2293, 1589, 893, 4946, 4370, 4841, 2342, 307, 308, 309, 894, 2246, 2155, 3646, 4059, 1431, 1331, 310, 311, 4948, 312, 895, 1779, 313, 314, 315, 316, 896, 1558, 1552, 317, 2312, 318, 319, 897, 320, 898, 321, 322, 899, 1958, 2022, 2016, 900, 2454, 323, 2427, 2134, 324, 901, 325, 902, 326, 2373, 4803, 2459, 1491, 327, 328, 903, 2463, 2264, 329, 330, 904, 1635, 4820, 905, 2506, 331, 4706, 4484, 1756, 906, 907, 4661, 2179, 4584, 4609, 332, 4907, 4635, 4529, 4683, 4523, 4561, 333, 3536, 2701, 2799, 3332, 3294, 3159, 3069, 2637, 3025, 2782, 3247, 3350, 2692, 2586, 3004, 3049, 2694, 2650, 3554, 2983, 3403, 3214, 3163, 2541, 3090, 3097, 3462, 1430, 2941, 3486, 2842, 3558, 3104, 3037, 3419, 2780, 2931, 1276, 2928, 2609, 3068, 3128, 2548, 2538, 2618, 2789, 3228, 2657, 3189, 2128, 2863, 3307, 3300, 2546, 3048, 3543, 2946, 2975, 3346, 3067, 2728, 2955, 3408, 3027, 3094, 3203, 2988, 2751, 2953, 2566, 2578, 2823, 3063, 3335, 3000, 3181, 3011, 3138, 3389, 2805, 3074, 2894, 3149, 2560, 3417, 3265, 3378, 2901, 2837, 2822, 2745, 3473, 3530, 3040, 2597, 3509, 3522, 3161, 2926, 3209, 3105, 3400, 2630, 2905, 2671, 2818, 2806, 2702, 2709, 2400, 3549, 3538, 2534, 2773, 2623, 3491, 3243, 3136, 2693, 3164, 3343, 2918, 2555, 2794, 2679, 3510, 3110, 2672, 3442, 2929, 3184, 3488, 2135, 4763, 3414, 3093, 2996, 3141, 3544, 3102, 2856, 2957, 3466, 3461, 2788, 2660, 3344, 3204, 2720, 3379, 2826, 1789, 2396, 2785, 3249, 3527, 4460, 3352, 2051, 2569, 4457, 2011, 4857, 2163, 4319, 3906, 1533, 1755, 1888, 4248, 1557, 2153, 3804, 1363, 1934, 1602, 1404, 4188, 1330, 4349, 3337, 3533, 2629, 3038, 2539, 3567, 3291, 3348, 3115, 3359, 2993, 3079, 3506, 2527, 2963, 2938, 2516, 3113, 1345, 2639, 3143, 3044, 2747, 3154, 3280, 3039, 2743, 2902, 3056, 2554, 2522, 3103, 3210, 3434, 2656, 4251, 4166, 4196, 3206, 3328, 2588, 3553, 2714, 3078, 3222, 3137, 3357, 2717, 2944, 3012, 3220, 3202, 2811, 3083, 3269, 3566, 2699, 2515, 3023, 2533, 3288, 3075, 3005, 2685, 3058, 2976, 2622, 3333, 3463, 2939, 3521, 3268, 3117, 2626, 2616, 3240, 2570, 3565, 2919, 3157, 2849, 3444, 2631, 3420, 2659, 3325, 3186, 2920, 3258, 3440, 3457, 3310, 2761, 3134, 2621, 3531, 2711, 2774, 2867, 2585, 3155, 2620, 3156, 2844, 3126, 3160, 2909, 3542, 3225, 2887, 3474, 3218, 2744, 2896, 3135, 3424, 3498, 3529, 2661, 2667, 2549, 2819, 2768, 2935, 3182, 2772, 3230, 3043, 2922, 3581, 3524, 2869, 2610, 3298, 2775, 3108, 2603, 3614, 2612, 2860, 3187, 3238, 3786, 4385, 3016, 3436, 2876, 2987, 3532, 3438, 3561, 3259, 2663, 2890, 3433, 3071, 3018, 2580, 2755, 3015, 2540, 3398, 2664, 2583, 2830, 2644, 2641, 3513, 2725, 2723, 3338, 3556, 2866, 2514, 2932, 2753, 2862, 2899, 2605, 2989, 3096, 3124, 2985, 2716, 3145, 3017, 2591, 2640, 3033, 1853, 3216, 3316, 3412, 2971, 3256, 3153, 3575, 3339, 2915, 2531, 3552, 3475, 3060, 3375, 2756, 3382, 2847, 2859, 3251, 3702, 3423, 2537, 2801, 3076, 2696, 3092, 3459, 3144, 3441, 2802, 3479, 2907, 3512, 3518, 3021, 2871, 3032, 2647, 2945, 3045, 2763, 3313, 3034, 3315, 3541, 2746, 2669, 2524, 3003, 2732, 3166, 3046, 3306, 2873, 3364, 3253, 3215, 3061, 2804, 2722, 2964, 2990, 2836, 4098, 4449, 3173, 2762, 3737, 2628, 3507, 2564, 3031, 2872, 3360, 2658, 2930, 2904, 3244, 3217, 3311, 3445, 2840, 3372, 2958, 3098, 3356, 3456, 3388, 2624, 3207, 2576, 2742, 2665, 2815, 3052, 3421, 2593, 3242, 2535, 2966, 2898, 2858, 2943, 2668, 2798, 3196, 2528, 2713, 3001, 2691, 2948, 2767, 2544, 3302, 2734, 2893, 2592, 2861, 3502, 2969, 2582, 3229, 2676, 2545, 3255, 3330, 2547, 3257, 2882, 3151, 3088, 2883, 3318, 2645, 2733, 2587, 3500, 3008, 2715, 2845, 3183, 2654, 3233, 3267, 2741, 2827, 2704, 3091, 2832, 2736, 3177, 3271, 2835, 2908, 3176, 2947, 3292, 3191, 2517, 3026, 3082, 3392, 3381, 2584, 2712, 3213, 3451, 2634, 3150, 2810, 3303, 2573, 3460, 2615, 3394, 2828, 3329, 4377, 4499, 3555, 2974, 3782, 3629, 3578, 3885, 2817, 3248, 2954, 3334, 3571, 3345, 3551, 3384, 3422, 1357, 1844, 2530, 2973, 4418, 4081, 3951, 1764, 1671, 1852, 334, 1843, 3449, 3185, 3399, 2786, 3055, 3472, 3397, 2601, 3564, 3277, 4373, 3548, 3179, 3407, 3841, 3347, 3142, 4255, 4431, 3241, 3077, 2700, 3147, 2648, 3283, 2829, 3278, 2581, 2536, 4363, 2848, 3410, 2797, 2523, 2520, 2721, 3496, 2571, 3198, 3219, 3030, 2673, 2921, 3837, 3301, 3322, 2705, 3239, 2949, 3369, 3396, 2892, 2897, 2766, 3174, 3297, 2550, 2889, 2933, 2793, 2627, 2677, 3119, 2596, 3226, 3172, 3089, 2868, 2839, 3942, 3120, 3286, 2843, 3465, 1564, 3946, 4222, 1504, 3999, 2682, 1875, 2865, 3539, 3168, 2864, 3308, 3557, 2940, 3109, 3503, 2625, 3455, 3114, 2595, 3331, 2978, 2518, 2521, 4079, 3024, 3573, 2952, 2653, 1769, 3180, 2813, 2652, 2600, 2816, 3201, 3188, 3270, 2997, 2992, 3009, 3520, 2936, 3275, 3165, 3447, 3131, 3305, 2809, 2792, 2729, 2814, 2619, 3266, 2825, 3066, 2857, 2998, 3064, 2681, 3035, 3279, 2764, 3480, 3127, 2912, 3010, 2607, 3211, 3111, 3041, 1573, 3909, 4269, 3487, 3489, 3019, 335, 1266, 1415, 2980, 3428, 3435, 3482, 3020, 2748, 2646, 2787, 2760, 2563, 3085, 3133, 3158, 3170, 2703, 3494, 2556, 2552, 3395, 3245, 3404, 2675, 2791, 2252, 4845, 1911, 4856, 2363, 908, 1935, 4711, 4728, 2460, 2749, 3341, 3355, 2575, 2942, 2886, 2758, 2594, 3495, 2884, 3516, 3042, 2737, 2923, 3563, 2855, 3476, 2611, 2937, 3383, 3497, 3402, 3162, 2662, 2875, 3223, 2878, 2079, 1808, 3285, 2757, 3057, 2951, 3519, 2579, 2853, 3387, 3401, 3493, 3393, 1608, 3365, 2885, 3574, 3081, 3007, 3568, 3152, 3367, 3358, 336, 2268, 3468, 3290, 3550, 3132, 2726, 2879, 3190, 3309, 2613, 2765, 3106, 1355, 3454, 2851, 2881, 3232, 3458, 3326, 3353, 2927, 3212, 2950, 3376, 3208, 3062, 3612, 3195, 3385, 2686, 2602, 3569, 3123, 2727, 1622, 2821, 2636, 2750, 2850, 3050, 2925, 3336, 3540, 2689, 3139, 2526, 3361, 3022, 3427, 3107, 3140, 3371, 3276, 2831, 3501, 2924, 3366, 3199, 3101, 3321, 3499, 2917, 2683, 2800, 2812, 3340, 3227, 3148, 3657, 4446, 1746, 1464, 1886, 2666, 3246, 3130, 3560, 3236, 2730, 3572, 1607, 3689, 2968, 1457, 1500, 909, 337, 1184, 3450, 2577, 2567, 2532, 3415, 2934, 2984, 2568, 4147, 4943, 3002, 2986, 910, 2979, 2542, 2338, 2331, 2492, 1762, 4472, 1472, 1529, 2319, 2131, 4057, 4937, 2048, 4887, 1976, 4507, 1583, 338, 2078, 2372, 2102, 339, 911, 1711, 340, 912, 2013, 913, 2277, 914, 2403, 341, 915, 4672, 4902, 916, 342, 1594, 4440, 917, 343, 344, 4559, 918, 2439, 919, 345, 920, 346, 921, 922, 347, 2226, 348, 2180, 2298, 349, 350, 2099, 2036, 351, 4808, 923, 924, 4498, 1518, 3728, 3637, 3570, 3429, 4091, 2870, 2995, 4338, 3205, 2880, 3261, 1994, 3968, 4291, 4204, 4071, 4034, 1742, 2037, 352, 2820, 3912, 3287, 1218, 1190, 4145, 353, 2422, 354, 355, 925, 1782, 2184, 2261, 2490, 926, 927, 928, 4630, 2137, 3610, 356, 357, 4729, 358, 359, 4224, 1918, 1959, 1840, 3736, 1770, 929, 930, 931, 4155, 360, 361, 362, 932, 363, 364, 1279, 2289, 365, 1543, 366, 2156, 2472, 367, 4049, 1633, 1722, 368, 369, 1495, 1566, 370, 4967, 371, 372, 373, 1211, 1873, 2101, 2494, 1726, 374, 1442, 933, 1748, 4142, 1434, 1358, 1191, 3732, 4110, 4039, 4411, 4506, 4270, 4156, 3780, 4036, 4030, 4016, 1550, 3899, 1247, 1855, 1181, 3919, 1639, 3664, 1244, 4140, 3930, 4117, 4189, 4001, 3799, 3643, 3619, 1240, 1686, 1479, 1307, 1575, 4296, 1665, 3871, 4135, 1605, 4408, 3604, 1274, 4149, 1313, 3741, 1938, 3709, 1727, 3893, 1280, 3622, 1784, 3834, 1752, 1983, 1743, 3979, 4461, 4113, 3817, 4232, 1340, 1489, 4214, 3902, 1857, 2510, 2316, 1904, 1219, 1486, 1512, 1481, 1516, 3820, 3789, 4252, 4047, 4330, 4082, 4094, 1574, 1248, 4078, 1872, 1426, 3785, 3687, 4318, 4243, 3866, 3704, 4172, 1621, 4315, 1192, 1513, 1856, 2476, 3324, 2769, 2678, 1561, 3296, 375, 2348, 376, 377, 1395, 1584, 4093, 4453, 3940, 3778, 4374, 4210, 4009, 4264, 4339, 4368, 1738, 378, 1610, 4194, 4474, 4013, 4266, 1771, 1759, 1922, 3860, 3832, 1349, 1381, 3663, 1642, 1185, 4356, 3932, 1233, 4212, 3858, 1198, 4192, 3611, 1919, 1819, 3790, 3712, 1969, 4095, 1887, 4468, 1720, 4247, 934, 1790, 2002, 1657, 1663, 1336, 3894, 1554, 1494, 1405, 3576, 4314, 3695, 1851, 1850, 4362, 1815, 3845, 4511, 3656, 3638, 1406, 1596, 4454, 1443, 1661, 935, 4504, 1359, 1734, 3650, 1910, 1305, 1648, 3831, 4435, 1208, 1988, 4451, 1993, 1986, 3849, 1718, 4068, 1835, 1425, 1428, 1282, 4380, 1658, 1452, 1687, 4024, 379, 4072, 3791, 4491, 4323, 4014, 1304, 1440, 1511, 1981, 1676, 1547, 4422, 1283, 3861, 1383, 3644, 3691, 4259, 1749, 1418, 1176, 4216, 1387, 3992, 4423, 4253, 1618, 1871, 1256, 3748, 4119, 1297, 1586, 1251, 1299, 1954, 4450, 3990, 4029, 4097, 3890, 3796, 1389, 3711, 4344, 1578, 1476, 4343, 1202, 4413, 4384, 3808, 1647, 1475, 3892, 3674, 1739, 3926, 3595, 1943, 3756, 4405, 3973, 4109, 4159, 3744, 4387, 1960, 4275, 3781, 1535, 1210, 4492, 4365, 4118, 3655, 3886, 4278, 4383, 4485, 1392, 3751, 3931, 3986, 3678, 1249, 4353, 4208, 3710, 4238, 4213, 3969, 4436, 3175, 4128, 2970, 1228, 3534, 3437, 3406, 3641, 3639, 3954, 4335, 3995, 3582, 4475, 3784, 4470, 4010, 3802, 3941, 4427, 4396, 4348, 3587, 3818, 3864, 3956, 3863, 3731, 3814, 4067, 4354, 4350, 4334, 3821, 1932, 3929, 4171, 1258, 3824, 3631, 4465, 4494, 1320, 1398, 3828, 1204, 1223, 1284, 1685, 3773, 4209, 3014, 4462, 4246, 4190, 4312, 4023, 3760, 3753, 1178, 3884, 2783, 4038, 3545, 2916, 3112, 2834, 3880, 3673, 4102, 4399, 4048, 3752, 4207, 1235, 3943, 4355, 4087, 4100, 4327, 4037, 4163, 3918, 4486, 1243, 3933, 4178, 1662, 1643, 4152, 3634, 3617, 4445, 4303, 1370, 3838, 4199, 4284, 1213, 4382, 1399, 1187, 3714, 1828, 4487, 3615, 1842, 1501, 3746, 4018, 4420, 3606, 4121, 3724, 3935, 1941, 4419, 4282, 1955, 1949, 4310, 4488, 1577, 4127, 1288, 1171, 3670, 4052, 3627, 3777, 936, 1371, 3685, 1325, 1940, 380, 4482, 4258, 3812, 1581, 1860, 4124, 4508, 4500, 3652, 3972, 1309, 1630, 1528, 3717, 1217, 3692, 4430, 3764, 4316, 4285, 3645, 3971, 4421, 1172, 4026, 2740, 3125, 3546, 1725, 1206, 3842, 4404, 3690, 3962, 4513, 4340, 4329, 4410, 3703, 4136, 1763, 1487, 3589, 3907, 4153, 2707, 3730, 4426, 4180, 4041, 3923, 4444, 3851, 4429, 4361, 1441, 4394, 4302, 3758, 4510, 3742, 1868, 4077, 1710, 1939, 1335, 1666, 1407, 4187, 1193, 1188, 1196, 1724, 1717, 1200, 1646, 1997, 1975, 1701, 4280, 1613, 4006, 1984, 1351, 3653, 3833, 1593, 2561, 4442, 3900, 4298, 1761, 4388, 1820, 1597, 4317, 4249, 1341, 1203, 1680, 4441, 3628, 3725, 1945, 937, 4206, 1588, 1439, 3794, 4447, 1838, 3776, 3658, 4064, 1377, 4011, 4272, 4503, 1324, 1367, 3594, 3680, 1300, 1750, 938, 3913, 3774, 1877, 1987, 1862, 3998, 1380, 4185, 3686, 3696, 4463, 1350, 4008, 4230, 3853, 4244, 4083, 381, 1909, 3897, 1546, 382, 3613, 3273, 3452, 3525, 1229, 4105, 3835, 383, 1263, 1234, 3970, 1492, 3856, 3586, 1175, 4321, 4020, 4144, 1224, 1199, 3667, 2778, 4412, 4407, 1812, 1810, 3823, 1416, 1427, 1507, 1878, 4333, 3146, 4281, 4211, 1179, 3843, 1669, 1677, 1524, 1525, 1974, 384, 1979, 1456, 1239, 4167, 3740, 1876, 1388, 1967, 1474, 385, 1342, 1471, 4176, 1232, 1989, 4125, 1741, 1508, 1580, 4060, 4378, 1576, 1212, 1893, 3921, 3585, 1174, 1396, 4061, 4015, 1207, 3698, 3825, 3922, 4021, 4181, 1598, 1916, 1429, 4502, 4231, 1321, 4390, 3693, 3734, 1382, 3684, 1747, 3806, 3896, 3635, 1768, 4025, 3976, 3840, 3963, 4286, 1502, 3836, 4161, 3659, 3743, 4130, 3605, 1385, 1783, 4392, 4328, 1316, 4173, 4265, 1246, 1985, 1629, 1829, 1737, 3826, 1473, 1992, 1883, 1656, 1837, 1914, 1839, 1834, 3984, 4495, 3910, 4160, 3671, 4184, 4132, 4250, 1503, 1237, 1523, 1417, 4063, 1562, 3977, 1971, 1707, 1847, 1792, 3769, 4074, 1534, 4239, 4003, 3915, 1689, 1776, 1599, 1265, 1410, 1823, 1498, 1329, 939, 386, 387, 1655, 3874, 4261, 3626, 1791, 3579, 1644, 3936, 4054, 4260, 4359, 4131, 4297, 4357, 4022, 3770, 4046, 1222, 1996, 3788, 4169, 1925, 3953, 4228, 4226, 4277, 4101, 1889, 1369, 3797, 4088, 4019, 3771, 3632, 1402, 388, 1520, 1767, 1466, 1194, 4137, 1908, 1927, 1758, 3772, 3661, 4186, 4174, 1170, 3850, 1315, 1611, 1530, 1859, 2209, 4183, 1408, 1403, 941, 4033, 3623, 3596, 1461, 1848, 1173, 1928, 1459, 1765, 1826, 3719, 1931, 3584, 4004, 3591, 3967, 4168, 3957, 3878, 4165, 4191, 3980, 4058, 4200, 4336, 3958, 1260, 4051, 3798, 4032, 1774, 4322, 3991, 4106, 1641, 1570, 3978, 3965, 4464, 3813, 4154, 1365, 4257, 3846, 4345, 4379, 3603, 1693, 3937, 3801, 1787, 1214, 4483, 4201, 1898, 1845, 1226, 1220, 4245, 1347, 3867, 1900, 3640, 3916, 4089, 1209, 3745, 3988, 3975, 4236, 4075, 4146, 4256, 4308, 4000, 4148, 3588, 3868, 4403, 3883, 4326, 4393, 3895, 4237, 3955, 3727, 4005, 4092, 4372, 4283, 1553, 3805, 4151, 1281, 1681, 4489, 3982, 4437, 3597, 4342, 3872, 3987, 4490, 3876, 3668, 4300, 1679, 1242, 3598, 3583, 3647, 389, 4304, 3793, 3779, 1937, 1907, 4042, 3648, 3996, 3800, 4367, 4099, 1807, 3887, 4428, 1625, 1390, 1884, 1682, 4364, 4306, 3869, 1278, 1672, 942, 1505, 1542, 1709, 1915, 3600, 3914, 1968, 3948, 1670, 3811, 1865, 1362, 943, 1716, 3961, 1506, 4221, 1376, 944, 1683, 4276, 1445, 1721, 1632, 3607, 1328, 1455, 1913, 1497, 1317, 1951, 1778, 1379, 3768, 4225, 1668, 945, 390, 391, 4406, 4341, 1480, 392, 393, 394, 395, 1714, 1422, 396, 2043, 946, 2265, 397, 3618, 4433, 1177, 3898, 398, 2251, 947, 948, 2212, 949, 950, 399, 951, 400, 1965, 4640, 2345, 4471, 952, 953, 401, 402, 2475, 403, 404, 4758, 954, 955, 2437, 4139, 1482, 3602, 4434, 3721, 1592, 1825, 1698, 1519, 1352, 4202, 4409, 1977, 1917, 405, 406, 407, 408, 956, 957, 2267, 1631, 1684, 409, 2054, 3889, 958, 410, 2117, 411, 959, 412, 960, 2443, 4712, 4619, 2285, 413, 414, 415, 961, 2352, 2417, 962, 1905, 416, 963, 417, 418, 2382, 3675, 1833, 3974, 419, 964, 420, 421, 965, 966, 967, 4919, 968, 2365, 969, 970, 422, 1897, 2056, 2309, 1272, 4754, 2207, 971, 423, 4133, 3830, 4865, 972, 424, 973, 425, 2068, 4955, 426, 974, 2109, 2380, 427, 1708, 4676, 428, 4141, 429, 430, 3749, 431, 1619, 975, 4044, 3590, 1944, 4126, 1923, 1706, 432, 976, 977, 978, 4867, 4400, 433, 434, 1606, 2143, 979, 435, 980, 2604, 2895, 981, 436, 3448, 4959, 4563, 2188, 437, 438, 2055, 1692, 982, 2388, 2243, 983, 2035, 2120, 4940, 439, 440, 441, 2474, 4900, 2052, 4764, 3862, 4055, 4358, 984, 2435, 4589, 2276, 2401, 985, 1664, 443, 2073, 2405, 986, 4309, 4045, 3854, 3682, 2491, 444, 445, 1972, 2688, 4366, 3425, 3231, 3649, 2759, 2724, 3873, 3755, 1216, 3599, 3775, 2754, 2606, 3471, 3234, 2565, 2803, 2562, 2684, 3411, 3405, 2690, 1255, 3694, 446, 3985, 3535, 1306, 4084, 3282, 447, 1353, 2168, 1780, 987, 988, 989, 2126, 448, 449, 2107, 450, 2031, 990, 451, 452, 991, 1485, 2242, 453, 2286, 992, 1728, 993, 4703, 994, 995, 454, 1696, 996, 2039, 455, 997, 4874, 998, 3116, 1869, 456, 4759, 2500, 4798, 2262, 4562, 457, 1386, 999, 458, 4768, 4982, 4778, 2040, 1000, 4981, 3879, 2698, 459, 460, 1001, 461, 1447, 462, 1002, 2042, 2339, 1003, 463, 464, 4425, 1645, 465, 1004, 466, 2328, 467, 468, 469, 1231, 1468, 470, 471, 2496, 472, 473, 1005, 474, 475, 2108, 4725, 1006, 476, 1273, 1007, 1744, 1488, 1659, 477, 478, 4598, 1604, 4753, 2493, 479, 1008, 1009, 480, 1010, 1011, 1012, 1013, 1014, 481, 4313, 482, 483, 1499, 484, 1015, 4761, 2091, 2386, 2513, 1016, 4073, 1777, 2172, 485, 2205, 4592, 4545, 4720, 486, 1458, 4274, 2122, 4905, 4796, 2152, 4539, 4528, 4904, 4842, 4986, 4639, 4846, 4623, 4650, 4595, 2195, 4681, 487, 2182, 4710, 1775, 2083, 4205, 1526, 4586, 1697, 1017, 2000, 4692, 4795, 2480, 2017, 488, 2335, 489, 4969, 1894, 1882, 1817, 1880, 490, 1018, 3917, 3616, 4311, 1800, 4473, 4085, 4401, 1310, 3783, 3765, 1538, 3870, 491, 1948, 3699, 1735, 3792, 4290, 2074, 492, 5001, 2136, 493, 2211, 4532, 494, 2421, 495, 4090, 2378, 2104, 2210, 2247, 2478, 2047, 496, 4620, 4978, 4614, 1019, 2012, 1803, 3642, 497, 1322, 4752, 1020, 498, 1021, 2235, 2302, 2488, 4665, 4699, 4608, 4781, 499, 2049, 2404, 4685, 500, 501, 1022, 502, 1333, 503, 1023, 4686, 4804, 504, 4727, 505, 506, 4938, 4805, 2065, 1890, 4891, 1024, 507, 508, 509, 2110, 1025, 510, 1026, 3608, 1732, 511, 2397, 1864, 1816, 1531, 512, 513, 2451, 3636, 5012, 4892, 514, 1699, 4593, 1027, 4987, 515, 2495, 4660, 1028, 516, 1029, 2409, 1366, 2112, 2178, 2124, 2376, 5011, 4572, 4957, 4789, 4543, 4664, 4678, 2093, 4746, 2489, 4922, 2145, 1030, 4832, 4950, 1261, 4027, 3478, 3763, 2959, 1293, 2462, 517, 3197, 1595, 3413, 2067, 1031, 2228, 1448, 518, 4698, 4616, 2057, 2305, 2133, 2061, 4526, 4617, 1032, 1033, 2429, 2311, 1675, 1797, 519, 4578, 2271, 4693, 4604, 2466, 2148, 2420, 520, 4854, 2381, 2315, 2284, 4813, 521, 1034, 522, 523, 1999, 3759, 1215, 4122, 1730, 524, 525, 526, 3966, 4573, 5008, 1035, 527, 4973, 2508, 528, 3911, 529, 3289, 1821, 530, 531, 2426, 1036, 532, 1874, 533, 534, 1037, 535, 1038, 536, 1039, 537, 538, 539, 1040, 3767, 1929, 1041, 1042, 3683, 2100, 4853, 2300, 2165, 540, 2105, 541, 1043, 4906, 542, 1338, 2292, 2021, 1616, 1901, 1796, 1517, 4331, 4332, 4466, 2719, 3803, 4123, 4233, 1824, 3129, 3087, 3505, 4158, 4254, 1449, 2121, 1044, 3720, 4351, 4414, 1673, 3453, 3254, 2501, 1649, 543, 544, 545, 546, 1045, 547, 2225, 4240, 3580, 4680, 1046, 548, 549, 1047, 550, 2598, 551, 552, 553, 3819, 1259, 4062, 1048, 554, 2841, 1049, 1050, 3515, 2219, 1433, 1323, 4301, 555, 556, 1051, 557, 558, 1052, 1053, 3738, 1567, 559, 1054, 1270, 3857, 1055, 2151, 560, 2175, 2089, 1056, 4514, 2198, 2193, 1257, 1238, 3662, 561, 2186, 1057, 4637, 562, 1058, 563, 4872, 2097, 2436, 564, 1059, 565, 566, 1060, 1061, 2231, 4203, 1899, 3981, 1062, 1303, 4116, 567, 1063, 568, 569, 570, 2367, 1946, 3620, 1064, 1514, 4002, 3679, 3964, 3707, 3666, 1348, 4273, 1804, 4497, 571, 1401, 4438, 1895, 1264, 572, 1912, 573, 3939, 4170, 4056, 1271, 1065, 1521, 1221, 1066, 1451, 1654, 3934, 4080, 4352, 574, 1700, 3739, 1565, 1419, 1811, 3950, 1690, 1397, 3716, 1569, 1465, 1437, 1674, 4337, 1285, 4268, 1183, 3726, 3881, 4134, 4347, 4012, 3938, 4066, 4198, 4416, 4164, 3630, 4229, 4292, 4193, 4325, 4375, 4371, 4432, 4215, 1753, 3944, 1409, 4195, 1729, 4223, 1540, 4455, 1068, 1069, 4512, 1723, 1070, 3750, 3633, 4070, 4104, 4162, 4235, 1863, 4346, 1881, 1071, 1814, 1572, 575, 4443, 3761, 1346, 1587, 1072, 3592, 576, 1891, 4469, 1275, 577, 1950, 1963, 4129, 1073, 1296, 1360, 1551, 3733, 4111, 3993, 4108, 3949, 1287, 1713, 1556, 1736, 1995, 1435, 1424, 1830, 1705, 1861, 1197, 1254, 4120, 1545, 4417, 1469, 1292, 2185, 2279, 1785, 1236, 4293, 1827, 3839, 3983, 4395, 1957, 2222, 578, 3928, 4295, 3715, 3855, 3609, 1990, 4076, 4175, 3927, 1757, 1650, 4299, 1773, 2004, 1267, 1364, 579, 1462, 1879, 4007, 3729, 3665, 3722, 1691, 1712, 1074, 1624, 1751, 1394, 3924, 3952, 580, 581, 2003, 1343, 2203, 1559, 1250, 1555, 2304, 582, 2395, 4114, 1818, 1075, 583, 1076, 1077, 1704, 4448, 584, 4882, 1078, 1079, 1786, 585, 3354, 1832, 586, 3432, 2891, 587, 588, 4583, 2505, 1903, 2077, 4936, 4658, 4830, 2446, 1080, 2278, 1081, 1082, 4459, 1083, 589, 1563, 1084, 2113, 590, 591, 1085, 2256, 592, 2308, 593, 594, 2274, 595, 4931, 2407, 1858, 597, 598, 1453, 2559, 2590, 2738, 4478, 4069, 1809, 1327, 4150, 3260, 3481, 3672, 3625, 2008, 4439, 3852, 3997, 1411, 599, 3847, 4993, 1268, 4050, 3377, 4424, 1496, 4143, 4493, 3492, 1962, 1412, 2455, 600, 2457, 2321, 1086, 601, 4017, 4477, 1794, 2483, 4776, 2291, 602, 4263, 3072, 2009, 2199, 1754, 1087, 1088, 3888, 603, 604, 4777, 2324, 605, 1368, 3827, 4103, 606, 607, 1089, 2220, 4549, 1090, 1571, 1091, 1438, 608, 1092, 609, 2320, 2069, 610, 611, 1093, 612, 1094, 3701, 4389, 613, 4897, 1603, 614, 1095, 2154, 5000, 615, 616, 2263, 1332, 1715, 4369, 1652, 1096, 617, 1541, 618, 1921, 1733, 1373, 1870, 619, 4218, 1798, 2387, 1097, 1098, 1099, 1100, 620, 1702, 621, 622, 4855, 4847, 2398, 2239, 1101, 1667, 1384, 623, 4745, 3700, 1788, 1600, 624, 2098, 625, 4550, 4721, 4960, 4878, 2473, 4792, 4675, 1102, 1423, 626, 2771, 627, 1339, 3875, 628, 629, 3070, 4565, 2118, 2015, 4818, 4860, 2557, 2795, 2906, 2103, 4869, 2029, 3299, 3118, 4932, 4838, 4901, 4908, 4996, 4779, 2377, 4657, 4646, 4875, 4627, 4515, 4876, 4965, 4605, 4576, 2028, 4985, 4799, 4850, 1103, 4757, 4747, 1614, 1947, 2237, 630, 631, 4997, 4618, 4479, 3766, 632, 1104, 1105, 4886, 1106, 2432, 4827, 633, 1107, 4530, 634, 2371, 1108, 4536, 635, 1813, 636, 2431, 4866, 4991, 4814, 4560, 4956, 637, 4555, 1109, 4941, 4633, 2213, 638, 639, 3706, 1110, 640, 1111, 641, 4581, 4893, 4831, 2481, 4644, 4734, 2190, 4524, 4881, 4837, 4888, 4648, 642, 4548, 4807, 4896, 4868, 2374, 1112, 4823, 2164, 1113, 3735, 3390, 1694, 3431, 2838, 3483, 3464, 3848, 2558, 3314, 3086, 3029, 2956, 3517, 2651, 2914, 2680, 2632, 3121, 3100, 3528, 3526, 3084, 4220, 3304, 2846, 1186, 3235, 2903, 3559, 2687, 3409, 3237, 2900, 2999, 3349, 3171, 2752, 3262, 3504, 3047, 4376, 3193, 3430, 2525, 2670, 2911, 3508, 2776, 2697, 3200, 2790, 3323, 2543, 2874, 2614, 3904, 3373, 3054, 2617, 4242, 3621, 2708, 4179, 4398, 3959, 4935, 1269, 3095, 1286, 3624, 4481, 1432, 3511, 2735, 4381, 3295, 1585, 2390, 1568, 1114, 1766, 3221, 2643, 2739, 643, 4735, 4629, 1115, 4918, 4688, 3920, 644, 4723, 4949, 4748, 4607, 4719, 1116, 645, 646, 4611, 2353, 4603, 4762, 4819, 2221, 4636, 4992, 4998, 2307, 647, 1801, 4279, 3762, 1637, 1509, 4843, 4797, 4590, 4516, 4995, 4541, 2200, 4580, 4858, 648, 649, 2502, 2477, 4724, 4551, 4674, 1118, 1119, 2965, 2369, 2695, 3293, 650, 651, 4730, 4862, 4722, 4944, 1120, 652, 1121, 4983, 4784, 4877, 4643, 653, 654, 4909, 1122, 3264, 655, 2076, 4849, 656, 657, 2447, 658, 659, 2191, 4035, 2910, 3391, 2808, 3099, 2913, 3676, 2852, 3284, 2731, 1609, 2375, 2201, 3537, 3994, 1319, 4467, 1802, 1227, 1623, 660, 4844, 4714, 4979, 4812, 2192, 1123, 661, 2364, 662, 663, 664, 1124, 1125, 665, 2487, 4899, 2138, 1126, 666, 667, 4569, 4917, 2322, 1127, 1128, 1129, 668, 669, 1130, 670, 1131, 1527, 1132, 671, 1772, 2314, 1133, 1134, 2470, 1135, 672, 2236, 4716, 673, 4600, 2196, 674, 2456, 4588, 4963, 4851, 4558, 4557, 4697, 4610, 4773, 4687, 4708, 4910, 2123, 1136, 1137, 2358, 5005, 2208, 4952, 4945, 1933, 1731, 1793, 675, 676, 3342, 1138, 1139, 677, 4840, 4597, 4870, 1140, 4990, 4954, 4916, 678, 1141, 4737, 4527, 2253, 4531, 679, 1142, 1143, 680, 4771, 1144, 4638, 681, 4705, 4525, 4522, 4898, 2325, 2415, 5004, 1145, 682, 683, 2141, 1146, 684, 685, 2445, 686, 687, 4861, 688, 3822, 689, 690, 4743, 691, 1147, 1601, 692, 1148, 693, 4537, 4825, 4625, 4621, 3905, 694, 695, 1414, 1149, 696, 2027, 2159, 4756, 4690, 4859, 4793, 4575, 2160, 4828, 4731, 4718, 4802, 4750, 1150, 2081, 2258, 697, 1795, 1372, 1695, 1866, 1151, 4115, 1719, 2280, 4662, 698, 2176, 2217, 1920, 699, 700, 701, 4999, 1544, 4739, 2512, 702, 703, 4031, 4305, 1636, 1393, 2010, 3810, 4452, 3677, 4227, 1277, 1400, 4402, 4157, 4197, 1337, 1253, 1532, 4028, 3989, 2449, 4715, 704, 2050, 1493, 1854, 1902, 1510, 1152, 2340, 4182, 706, 4652, 2442, 2484, 707, 708, 709, 4667, 1153, 2412, 4732, 4476, 2053, 710, 1375, 711, 712, 713, 4829, 4738, 4811, 4570, 1245, 714, 2045, 4707, 715, 2169, 4713, 1841, 4234, 4924, 1154, 1314, 4096, 2023, 717, 4895, 2414, 718, 1155, 719, 720, 2063, 1311, 4921, 721, 4833, 4903, 4885, 4666, 2249, 4217, 1156, 723, 1157, 1627, 2116, 4566, 2287, 1158, 2330, 4826, 4622, 4740, 724, 4700, 725, 1159, 5013, 4894, 726, 2434, 1953, 1160, 1201, 727, 3787, 2046, 1161, 728, 729, 2485, 2044, 4568, 3747, 2248, 730, 731, 1846, 2507, 2368, 1162, 2019, 2333, 3815, 2005, 2266, 1964, 2347, 732, 2177, 2059, 4958, 4927, 1822, 4815, 1262, 2094, 4480, 1537, 1291, 2419, 1318, 4628, 4294, 2486, 4926, 1582, 2162, 733, 4587, 734, 735, 3439, 2833, 4287, 4509, 4505, 4267, 3697, 3272, 4112, 2967, 3651, 1991, 1805, 1628, 3705, 2479, 736, 1195, 4863, 1163, 3859, 1164, 2394, 1165, 2355, 2351, 4679, 4835, 2259, 4839, 2275, 1166, 4968, 4912, 2423, 737, 1167, 4989, 4684, 4612, 2127, 1745, 1973, 4767, 1168, 2273, 2310, 3807, 4307, 1169, 2303, 1454, or 1781. In some aspects, the 581 to 589 region of the VP capsid polypeptide has a sequence of any one of SEQ ID NOs: 2498, 4884, 738, 739, 4177, 1289, 740, 14, 15, 741, 742, 743, 16, 744, 17, 18, 745, 3477, 1548, 3051, 2982, 2171, 2877, 746, 19, 20, 3036, 3426, 3073, 3169, 747, 2406, 3362, 2784, 2469, 4889, 21, 3192, 4942, 22, 23, 1638, 748, 24, 25, 749, 26, 27, 1703, 1836, 28, 2038, 2301, 3660, 29, 750, 30, 31, 2095, 1640, 33, 34, 35, 36, 37, 4742, 2450, 38, 4925, 39, 751, 752, 1653, 1205, 3795, 753, 4288, 4219, 2770, 2962, 4241, 4107, 2718, 3317, 4391, 4053, 3263, 2553, 3947, 2710, 2608, 3467, 2796, 2961, 2529, 3320, 2674, 2635, 3446, 3053, 3250, 3688, 1182, 1998, 4320, 3351, 2655, 3514, 2779, 3194, 3319, 3224, 3281, 3708, 2807, 3562, 3274, 3374, 3013, 3416, 2981, 3065, 2777, 3469, 2977, 2638, 2972, 3059, 2574, 3380, 4262, 3167, 3368, 2781, 3547, 3386, 1225, 2960, 3485, 3370, 3443, 2824, 754, 1467, 3327, 3178, 3006, 3252, 2991, 3470, 2888, 2572, 3418, 2642, 2519, 3363, 40, 2633, 41, 42, 43, 755, 2511, 44, 45, 756, 46, 757, 47, 48, 1952, 758, 2341, 2410, 49, 3122, 2551, 3718, 4806, 2216, 3484, 3577, 759, 2072, 2034, 50, 1308, 1230, 3960, 1378, 2994, 3080, 2589, 3681, 51, 4694, 2257, 2167, 52, 760, 53, 2389, 4934, 4951, 4755, 761, 4591, 762, 4659, 54, 2146, 3925, 55, 3654, 2087, 2346, 4766, 4682, 4984, 4744, 56, 763, 764, 4626, 4702, 57, 58, 59, 60, 61, 4086, 1740, 1660, 765, 766, 62, 1966, 2032, 2499, 2332, 767, 63, 2096, 2181, 4913, 2438, 2041, 64, 768, 769, 770, 2384, 2402, 771, 65, 66, 67, 772, 2458, 2197, 68, 3816, 69, 2599, 2706, 2497, 70, 2234, 2183, 2399, 71, 4769, 2366, 72, 73, 74, 3865, 1549, 1361, 2453, 3882, 773, 3713, 1942, 2140, 75, 1312, 4501, 76, 77, 774, 1413, 775, 776, 78, 1560, 4289, 3757, 79, 3593, 4043, 1806, 3908, 4397, 1615, 4415, 3723, 2006, 3754, 1470, 4360, 80, 3945, 2854, 3523, 3669, 1356, 777, 2132, 81, 82, 4065, 83, 84, 2030, 1294, 2413, 2064, 1484, 2299, 85, 4594, 86, 778, 87, 3891, 4456, 4040, 4496, 1982, 2001, 1478, 1189, 88, 1490, 1885, 1926, 89, 90, 91, 779, 2270, 780, 2161, 1180, 92, 781, 782, 783, 2356, 784, 785, 786, 94, 95, 787, 788, 1831, 1867, 96, 4458, 97, 1970, 4656, 2173, 1936, 2349, 1590, 4585, 98, 99, 100, 789, 790, 1298, 101, 1688, 791, 792, 2007, 4556, 2070, 102, 793, 4632, 103, 794, 795, 104, 105, 106, 2229, 796, 4691, 107, 2440, 1849, 108, 797, 4736, 2509, 2018, 2227, 4787, 109, 1579, 110, 1906, 111, 2428, 798, 2075, 112, 2411, 113, 2359, 799, 4848, 800, 2461, 1444, 2313, 2350, 4579, 4821, 801, 114, 2329, 4864, 4834, 115, 1344, 116, 802, 117, 118, 119, 4929, 4677, 120, 4791, 2158, 121, 803, 804, 1463, 805, 122, 2139, 2290, 1760, 2465, 123, 2424, 2058, 2230, 124, 4717, 806, 125, 126, 2370, 127, 4521, 128, 4971, 4994, 807, 4533, 129, 130, 131, 132, 4933, 808, 2336, 2026, 2204, 809, 810, 2281, 133, 1978, 134, 811, 812, 135, 136, 137, 138, 813, 814, 139, 4673, 140, 815, 1326, 141, 142, 143, 2344, 5009, 144, 145, 816, 4654, 2125, 4663, 4810, 4816, 1634, 1302, 817, 146, 818, 147, 148, 149, 4546, 150, 151, 152, 153, 154, 155, 819, 820, 156, 2149, 157, 2295, 821, 158, 160, 161, 4631, 2441, 162, 163, 164, 165, 166, 822, 167, 168, 169, 170, 171, 823, 172, 4613, 824, 1651, 173, 1483, 174, 175, 825, 176, 177, 178, 179, 4624, 4809, 4520, 180, 826, 827, 181, 828, 4695, 2130, 4911, 182, 4582, 4873, 4596, 2020, 2189, 183, 4641, 829, 184, 185, 2244, 4647, 186, 187, 188, 189, 190, 830, 191, 192, 193, 194, 2071, 4615, 2361, 195, 4852, 4914, 4947, 196, 1391, 197, 4534, 4726, 198, 199, 4920, 831, 2240, 2223, 200, 201, 202, 203, 2106, 2503, 4775, 204, 205, 832, 833, 206, 834, 2232, 2294, 207, 2166, 208, 209, 210, 835, 836, 1334, 837, 3901, 3312, 2649, 1301, 211, 212, 1450, 4386, 3028, 213, 1446, 214, 2206, 215, 1896, 1522, 3490, 838, 216, 2090, 2241, 217, 218, 4653, 219, 1612, 220, 221, 222, 839, 223, 4953, 4974, 4790, 4915, 2464, 4567, 4774, 4964, 2360, 840, 224, 4928, 4741, 225, 2088, 4751, 5007, 4542, 226, 227, 4890, 4519, 4883, 228, 4786, 229, 230, 231, 2448, 841, 842, 232, 233, 4782, 234, 4962, 2269, 843, 235, 844, 236, 237, 4930, 845, 846, 238, 847, 4704, 239, 848, 849, 2150, 850, 851, 852, 853, 1536, 240, 854, 241, 242, 243, 244, 245, 246, 247, 248, 4923, 2245, 4696, 855, 4634, 856, 249, 250, 251, 252, 253, 254, 255, 857, 2115, 2218, 256, 257, 258, 259, 858, 859, 260, 261, 860, 861, 862, 262, 4966, 863, 864, 263, 4749, 4970, 2296, 2318, 4535, 865, 2326, 264, 1241, 265, 266, 866, 1477, 267, 867, 268, 868, 269, 4668, 270, 869, 870, 271, 871, 872, 272, 4822, 4709, 873, 4655, 4972, 2317, 874, 1252, 273, 1591, 4975, 875, 274, 2025, 275, 1980, 276, 876, 877, 2066, 277, 278, 279, 4670, 280, 2323, 2288, 2334, 4939, 4689, 281, 878, 2416, 1892, 879, 1539, 2214, 2215, 880, 2327, 881, 882, 4601, 1295, 3601, 3877, 1930, 1420, 1678, 1460, 2306, 884, 282, 1799, 283, 284, 4988, 4871, 4553, 4772, 2260, 285, 1626, 885, 286, 1374, 886, 2119, 2504, 2468, 287, 2408, 1620, 1290, 2425, 2482, 4564, 4671, 2282, 288, 1354, 2033, 289, 887, 290, 888, 291, 1956, 2362, 2467, 889, 2357, 4547, 4765, 292, 4794, 2391, 4324, 293, 890, 294, 295, 4138, 891, 2297, 2254, 296, 2224, 3903, 297, 892, 3829, 298, 299, 3809, 4271, 3844, 1436, 300, 1515, 1617, 4701, 2174, 301, 1961, 4649, 5010, 302, 2060, 303, 304, 305, 2452, 2147, 4574, 4538, 306, 2293, 1589, 893, 4946, 4370, 4841, 2342, 307, 308, 309, 894, 2246, 2155, 3646, 4059, 1431, 1331, 311, 4836, 4948, 312, 895, 1779, 313, 314, 315, 316, 896, 1558, 1552, 317, 2312, 318, 319, 897, 320, 898, 321, 322, 899, 1958, 2022, 2016, 900, 2454, 323, 2427, 2134, 324, 901, 325, 902, 326, 2373, 4803, 2459, 1491, 327, 328, 903, 2463, 2264, 329, 330, 1635, 4820, 905, 331, 4706, 2092, 4484, 1756, 906, 907, 4661, 2179, 4584, 4609, 332, 4907, 4635, 4529, 4683, 4561, 333, 2337, 3536, 2701, 2799, 3332, 3294, 3159, 3069, 2637, 3025, 2782, 3247, 3350, 2692, 2586, 3004, 3049, 2694, 2650, 3554, 2983, 3403, 3214, 3163, 2541, 3090, 3097, 3462, 1430, 2941, 3486, 2842, 3558, 3104, 3037, 3419, 2780, 2931, 1276, 2928, 2609, 3068, 3128, 2548, 2538, 2618, 2789, 3228, 2657, 3189, 2128, 2863, 3307, 3300, 2546, 3048, 3543, 2946, 2975, 3346, 3067, 2728, 2955, 3408, 3027, 3094, 3203, 2988, 2751, 2953, 2566, 2578, 2823, 3063, 3335, 3000, 3181, 3011, 3138, 3389, 2805, 3074, 2894, 3149, 2560, 3417, 3265, 3378, 2901, 2837, 2822, 2745, 3473, 3530, 3040, 2597, 3509, 3522, 3161, 2926, 3209, 3105, 3400, 2630, 2905, 2671, 2818, 2806, 2702, 2709, 2400, 3549, 3538, 2534, 2773, 2623, 3491, 3243, 3136, 2693, 3164, 3343, 2918, 2555, 2794, 2679, 3510, 3110, 2672, 3442, 2929, 3184, 3488, 2135, 4763, 3414, 3093, 2996, 3141, 3544, 3102, 2856, 2957, 3466, 3461, 2788, 2660, 3344, 3204, 2720, 3379, 2826, 1789, 2396, 2785, 3249, 3527, 4460, 3352, 2051, 2569, 4457, 2011, 4857, 2163, 4783, 4319, 3906, 1533, 1755, 1888, 4248, 1557, 3804, 1363, 1934, 1602, 1404, 4188, 1330, 4349, 3337, 3533, 2629, 3038, 2539, 3567, 3291, 3348, 3115, 3359, 2993, 3079, 3506, 2527, 2963, 2938, 2516, 3113, 1345, 2639, 3143, 3044, 2747, 3154, 3280, 3039, 2743, 2902, 3056, 2554, 2522, 3103, 3210, 3434, 2656, 4251, 4166, 4196, 3206, 3328, 2588, 3553, 2714, 3078, 3222, 3137, 3357, 2717, 2944, 3012, 3220, 3202, 2811, 3083, 3269, 3566, 2699, 2515, 3023, 2533, 3288, 3075, 3005, 2685, 3058, 2976, 2622, 3333, 3463, 2939, 3521, 3268, 3117, 2626, 2616, 3240, 2570, 3565, 2919, 3157, 2849, 3444, 2631, 3420, 2659, 3325, 3186, 2920, 3258, 3440, 3457, 3310, 2761, 3134, 2621, 3531, 2711, 2774, 2867, 2585, 3155, 2620, 3156, 2844, 3126, 3160, 2909, 3542, 3225, 2887, 3474, 3218, 2744, 2896, 3135, 3424, 3498, 3529, 2661, 2667, 2549, 2819, 2768, 2935, 3182, 2772, 3230, 3043, 2922, 3581, 3524, 2869, 2610, 3298, 2775, 3108, 2603, 3614, 2612, 2860, 3187, 3238, 3786, 4385, 3016, 3436, 2876, 2987, 3532, 3438, 3561, 3259, 2663, 2890, 3433, 3071, 3018, 2580, 2755, 3015, 2540, 3398, 2664, 2583, 2830, 2644, 2641, 3513, 2725, 2723, 3338, 3556, 2866, 2514, 2932, 2753, 2862, 2899, 2605, 2989, 3096, 3124, 2985, 2716, 3145, 3017, 2591, 2640, 3033, 1853, 3216, 3316, 3412, 2971, 3256, 3153, 3575, 3339, 2915, 2531, 3552, 3475, 3060, 3375, 2756, 3382, 2847, 2859, 3251, 3702, 3423, 2537, 2801, 3076, 2696, 3092, 3459, 3144, 3441, 2802, 3479, 2907, 3512, 3518, 3021, 2871, 3032, 2647, 2945, 3045, 2763, 3313, 3034, 3315, 3541, 2746, 2669, 2524, 3003, 2732, 3166, 3046, 3306, 2873, 3364, 3253, 3215, 3061, 2804, 2722, 2964, 2990, 2836, 4098, 4449, 3173, 2762, 3737, 2628, 3507, 2564, 3031, 2872, 3360, 2658, 2930, 2904, 3244, 3217, 3311, 3445, 2840, 3372, 2958, 3098, 3356, 3456, 3388, 2624, 3207, 2576, 2742, 2665, 2815, 3052, 3421, 2593, 3242, 2535, 2966, 2898, 2858, 2943, 2668, 2798, 3196, 2528, 2713, 3001, 2691, 2948, 2767, 2544, 3302, 2734, 2893, 2592, 2861, 3502, 2969, 2582, 3229, 2676, 2545, 3255, 3330, 2547, 3257, 2882, 3151, 3088, 2883, 3318, 2645, 2733, 2587, 3500, 3008, 2715, 2845, 3183, 2654, 3233, 3267, 2741, 2827, 2704, 3091, 2832, 2736, 3177, 3271, 2835, 2908, 3176, 2947, 3292, 3191, 2517, 3026, 3082, 3392, 3381, 2584, 2712, 3213, 3451, 2634, 3150, 2810, 3303, 2573, 3460, 2615, 3394, 2828, 3329, 4377, 4499, 3555, 2974, 3782, 3629, 3578, 3885, 2817, 3248, 2954, 3334, 3571, 3345, 3551, 3384, 3422, 1357, 1844, 2530, 2973, 4418, 4081, 3951, 1764, 1671, 1852, 334, 1843, 3449, 3185, 3399, 2786, 3055, 3472, 3397, 2601, 3564, 3277, 4373, 3548, 3179, 3407, 3841, 3347, 3142, 4255, 4431, 3241, 3077, 2700, 3147, 2648, 3283, 2829, 3278, 2581, 2536, 4363, 2848, 3410, 2797, 2523, 2520, 2721, 3496, 2571, 3198, 3219, 3030, 2673, 2921, 3837, 3301, 3322, 2705, 3239, 2949, 3369, 3396, 2892, 2897, 2766, 3174, 3297, 2550, 2889, 2933, 2793, 2627, 2677, 3119, 2596, 3226, 3172, 3089, 2868, 2839, 3942, 3120, 3286, 2843, 3465, 1564, 3946, 4222, 1504, 3999, 2682, 1875, 2865, 3539, 3168, 2864, 3308, 3557, 2940, 3109, 3503, 2625, 3455, 3114, 2595, 3331, 2978, 2518, 2521, 4079, 3024, 3573, 2952, 2653, 1769, 3180, 2813, 2652, 2600, 2816, 3201, 3188, 3270, 2997, 2992, 3009, 3520, 2936, 3275, 3165, 3447, 3131, 3305, 2809, 2792, 2729, 2814, 2619, 3266, 2825, 3066, 2857, 2998, 3064, 2681, 3035, 3279, 2764, 3480, 3127, 2912, 3010, 2607, 3211, 3111, 3041, 1573, 3909, 4269, 3487, 3489, 3019, 335, 1266, 1415, 2980, 3428, 2444, 3435, 3482, 3020, 2748, 2646, 2787, 2760, 2563, 3085, 3133, 3158, 3170, 2703, 3494, 2556, 2552, 3395, 3245, 3404, 2675, 2791, 2252, 4845, 1911, 4856, 2363, 908, 1935, 4711, 4728, 2460, 4517, 2749, 3341, 3355, 2575, 2942, 2886, 2758, 2594, 3495, 2884, 3516, 3042, 2737, 2923, 3563, 2855, 3476, 2611, 2937, 3383, 3497, 3402, 3162, 2662, 2875, 3223, 2878, 2079, 1808, 3285, 2757, 3057, 2951, 3519, 2579, 2853, 3387, 3401, 3493, 3393, 1608, 3365, 2885, 3574, 3081, 3007, 3568, 3152, 3367, 3358, 336, 2268, 3468, 3290, 3550, 3132, 2726, 2879, 3190, 3309, 2613, 2765, 3106, 1355, 3454, 2851, 2881, 3232, 3458, 3326, 3353, 2927, 3212, 2950, 3376, 3208, 3062, 3612, 3195, 3385, 2686, 2602, 3569, 3123, 2727, 1622, 2821, 2636, 2750, 2850, 3050, 2925, 3336, 3540, 2689, 3139, 2526, 3361, 3022, 3427, 3107, 3140, 3371, 3276, 2831, 3501, 2924, 3366, 3199, 3101, 3321, 3499, 2917, 2683, 2800, 2812, 3340, 3227, 3148, 3657, 4446, 1746, 1464, 1886, 2666, 3246, 3130, 3560, 3236, 2730, 3572, 1607, 3689, 2968, 1457, 1500, 337, 1184, 3450, 2577, 2567, 2532, 3415, 2934, 2984, 2568, 4147, 4943, 3002, 2986, 910, 2979, 2542, 2338, 2331, 2492, 1762, 4472, 1472, 1529, 2319, 4057, 4937, 2048, 4887, 1976, 4507, 1583, 338, 2078, 2372, 2102, 339, 911, 1711, 340, 912, 2013, 913, 2277, 914, 2403, 341, 915, 4902, 916, 342, 1594, 4440, 917, 343, 344, 4559, 918, 2233, 2439, 919, 345, 920, 346, 921, 922, 347, 2226, 348, 2180, 2298, 349, 350, 2099, 2036, 351, 4808, 923, 924, 4498, 1518, 3728, 3637, 3570, 3429, 4091, 2870, 2995, 4338, 3205, 2880, 3261, 1994, 3968, 4291, 4204, 4071, 4034, 1742, 2037, 352, 2820, 3912, 3287, 1218, 1190, 4145, 353, 2422, 354, 355, 925, 1782, 2184, 2261, 2490, 926, 927, 928, 4630, 2137, 3610, 356, 357, 4729, 358, 359, 4224, 1918, 1959, 1840, 3736, 2471, 1770, 929, 930, 931, 4155, 360, 361, 362, 932, 363, 364, 1279, 2289, 365, 1543, 366, 2156, 2472, 367, 4049, 1633, 1722, 368, 369, 1495, 1566, 370, 4967, 371, 372, 373, 1211, 1873, 2101, 2494, 1726, 374, 1442, 933, 1748, 4142, 1434, 1358, 1191, 3732, 4110, 4039, 4411, 4506, 4270, 4156, 3780, 4036, 4030, 4016, 1550, 3899, 1247, 1855, 1181, 3919, 1639, 3664, 1244, 4140, 3930, 4117, 4189, 4001, 3799, 3643, 3619, 1240, 1686, 1479, 1307, 1575, 4296, 1665, 3871, 4135, 1605, 4408, 3604, 1274, 4149, 1313, 3741, 1938, 3709, 1727, 3893, 1280, 3622, 1784, 3834, 1752, 1983, 1743, 3979, 4461, 4113, 3817, 4232, 1340, 1489, 4214, 3902, 1857, 2510, 2316, 1904, 1219, 1486, 1512, 1481, 1516, 3820, 3789, 4252, 4047, 4330, 4082, 4094, 1574, 1248, 4078, 1872, 1426, 3785, 3687, 4318, 4243, 3866, 3704, 4172, 1621, 4315, 1192, 1513, 1856, 2476, 3324, 2769, 2678, 1561, 3296, 375, 2343, 2348, 376, 377, 1395, 1584, 4093, 4453, 3940, 3778, 4374, 4210, 4009, 4264, 4339, 4368, 1738, 378, 1610, 4194, 4474, 4013, 4266, 1771, 1759, 1922, 3860, 3832, 1349, 1381, 3663, 1642, 1185, 4356, 3932, 1233, 4212, 3858, 1198, 4192, 3611, 1919, 1819, 3790, 3712, 1969, 4095, 1887, 4468, 1720, 4247, 934, 1790, 2002, 1657, 1663, 1336, 3894, 1554, 1494, 1405, 3576, 4314, 3695, 1851, 1850, 4362, 1815, 3845, 4511, 3656, 3638, 1406, 1596, 4454, 1443, 1661, 935, 4504, 1359, 1734, 3650, 1910, 1305, 1648, 3831, 4435, 1208, 1988, 4451, 1993, 1986, 3849, 1718, 4068, 1835, 1425, 1428, 1282, 4380, 1658, 1452, 1687, 4024, 379, 4072, 3791, 4491, 4323, 4014, 1304, 1440, 1511, 1981, 1676, 1547, 4422, 1283, 3861, 1383, 3644, 3691, 4259, 1749, 1418, 1176, 4216, 1924, 1421, 1387, 3992, 4423, 4253, 1618, 1871, 1256, 3748, 4119, 1297, 1586, 1251, 1299, 1954, 4450, 3990, 4029, 4097, 3890, 3796, 1389, 3711, 4344, 1578, 1476, 4343, 1202, 4413, 4384, 3808, 1647, 1475, 3892, 3674, 1739, 3926, 3595, 1943, 3756, 4405, 3973, 4109, 4159, 3744, 4387, 1960, 4275, 3781, 1535, 1210, 4492, 4365, 4118, 3655, 3886, 4278, 4383, 4485, 1392, 3751, 3931, 3986, 3678, 1249, 4353, 4208, 3710, 4238, 4213, 3969, 4436, 3175, 4128, 2970, 1228, 3534, 3437, 3406, 3641, 3639, 3954, 4335, 3995, 3582, 4475, 3784, 4470, 4010, 3802, 3941, 4427, 4396, 4348, 3587, 3818, 3864, 3956, 3863, 3731, 3814, 4067, 4354, 4350, 4334, 3821, 1932, 3929, 4171, 1258, 3824, 3631, 4465, 4494, 1320, 1398, 3828, 1204, 1223, 1284, 1685, 3773, 4209, 3014, 4462, 4246, 4190, 4312, 4023, 3760, 1178, 3884, 2783, 4038, 3545, 2916, 3112, 2834, 3880, 3673, 4102, 4399, 4048, 3752, 4207, 1235, 3943, 4355, 4087, 4100, 4327, 4037, 4163, 3918, 4486, 1243, 3933, 4178, 1662, 1643, 4152, 3634, 3617, 4445, 4303, 1370, 3838, 4199, 4284, 1213, 4382, 1399, 1187, 3714, 1828, 4487, 3615, 1842, 1501, 3746, 4018, 4420, 3606, 4121, 3724, 3935, 1941, 4419, 4282, 1955, 1949, 4310, 4488, 1577, 4127, 1288, 1171, 3670, 4052, 3627, 3777, 936, 1371, 3685, 1325, 1940, 380, 4482, 4258, 3812, 1581, 1860, 4124, 4508, 4500, 3652, 3972, 1309, 1630, 1528, 3717, 1217, 3692, 4430, 3764, 4316, 4285, 3645, 3971, 4421, 1172, 4026, 2740, 3125, 3546, 1206, 3842, 4404, 3690, 3962, 4513, 4340, 4329, 4410, 3703, 4136, 1763, 1487, 3589, 3907, 4153, 2707, 3730, 4426, 4180, 4041, 3923, 4444, 3851, 4429, 4361, 1441, 4394, 4302, 3758, 4510, 3742, 1868, 4077, 1710, 1939, 1335, 1666, 1407, 4187, 1193, 1188, 1196, 1724, 1717, 1200, 1646, 1997, 1975, 1701, 4280, 1613, 4006, 1984, 1351, 3653, 3833, 1593, 2561, 4442, 3900, 4298, 1761, 4388, 1820, 1597, 4317, 4249, 1341, 1203, 1680, 4441, 3628, 3725, 1945, 937, 4206, 1588, 1439, 3794, 4447, 1838, 3776, 3658, 4064, 1377, 4011, 4272, 4503, 1324, 1367, 3594, 3680, 1300, 1750, 938, 3913, 3774, 1877, 1987, 1862, 3998, 1380, 4185, 3686, 3696, 4463, 1350, 4008, 4230, 3853, 4244, 4083, 381, 1909, 3897, 1546, 382, 3613, 3273, 3452, 3525, 1229, 4105, 3835, 383, 1263, 1234, 3970, 1492, 3856, 3586, 1175, 4321, 4020, 4144, 1224, 1199, 3667, 2778, 4412, 4407, 1812, 1810, 3823, 1416, 1427, 1507, 1878, 4333, 3146, 4281, 4211, 1179, 3843, 1669, 1677, 1524, 1525, 1974, 384, 1979, 1456, 1239, 4167, 3740, 1876, 1388, 1967, 1474, 385, 1342, 1471, 4176, 1232, 1989, 4125, 1741, 1508, 1580, 4060, 4378, 1576, 1212, 1893, 3921, 3585, 1174, 1396, 4061, 4015, 1207, 3698, 3825, 3922, 4021, 4181, 1598, 1916, 1429, 4502, 4231, 1321, 4390, 3693, 3734, 1382, 3684, 1747, 3806, 3896, 3635, 1768, 4025, 3976, 3840, 3963, 4286, 1502, 3836, 4161, 3659, 3743, 4130, 3605, 1385, 1783, 4392, 4328, 1316, 4173, 4265, 1246, 1985, 1629, 1829, 1737, 3826, 1473, 1992, 1883, 1656, 1837, 1914, 1839, 1834, 3984, 4495, 3910, 4160, 3671, 4184, 4132, 4250, 1503, 1237, 1523, 1417, 4063, 1562, 3977, 1971, 1707, 1847, 1792, 3769, 4074, 1534, 4239, 4003, 3915, 1689, 1776, 1599, 1265, 1410, 1823, 1498, 1329, 939, 386, 940, 387, 1655, 3874, 4261, 3626, 1791, 3579, 1644, 3936, 4054, 4260, 4359, 4131, 4297, 4357, 4022, 3770, 4046, 1222, 1996, 3788, 4169, 1925, 3953, 4228, 4226, 4277, 4101, 1889, 1369, 3797, 4088, 4019, 3771, 3632, 1402, 388, 1520, 1767, 1466, 1194, 4137, 1908, 1927, 1758, 3772, 3661, 4186, 4174, 1170, 3850, 1315, 1611, 1530, 1859, 2209, 4183, 1408, 1403, 941, 4033, 3623, 3596, 1461, 1848, 1173, 1928, 1459, 1765, 1826, 3719, 1931, 3584, 4004, 3591, 3967, 4168, 3957, 3878, 4165, 4191, 3980, 4058, 4200, 4336, 3958, 1260, 4051, 3798, 4032, 1774, 4322, 3991, 4106, 1641, 1570, 3978, 3965, 4464, 3813, 4154, 1365, 4257, 3846, 4345, 4379, 3603, 1693, 3937, 3801, 1787, 1214, 4483, 4201, 1898, 1845, 1226, 1220, 4245, 1347, 3867, 1900, 3640, 3916, 4089, 1209, 3745, 3988, 3975, 4236, 4075, 4146, 4256, 4308, 4000, 4148, 3588, 3868, 4403, 3883, 4326, 4393, 3895, 4237, 3955, 3727, 4005, 4092, 4372, 4283, 1553, 3805, 4151, 1281, 1681, 4489, 3982, 4437, 3597, 4342, 3872, 3987, 4490, 3876, 3668, 4300, 1679, 1242, 3598, 3583, 3647, 389, 4304, 3793, 3779, 1937, 1907, 4042, 3648, 3996, 3800, 4367, 4099, 1807, 3887, 4428, 1625, 1390, 1884, 1682, 4364, 4306, 3869, 1278, 1672, 942, 1505, 1542, 1709, 1915, 3600, 3914, 1968, 3948, 1670, 3811, 1865, 1362, 943, 1716, 3961, 1506, 4221, 1376, 944, 1683, 4276, 1445, 1721, 1632, 3607, 1328, 1455, 1913, 1497, 1317, 1951, 1778, 1379, 3768, 4225, 1668, 2383, 945, 390, 391, 4406, 4341, 1480, 392, 393, 394, 395, 1714, 1422, 396, 2043, 946, 2265, 397, 3618, 4433, 1177, 3898, 398, 2251, 947, 948, 2212, 949, 950, 399, 951, 400, 1965, 4640, 2129, 2345, 4471, 952, 953, 401, 2475, 403, 404, 4758, 954, 955, 2437, 4139, 1482, 3602, 4434, 3721, 1592, 1825, 1698, 1519, 1352, 4202, 4409, 1977, 1917, 405, 406, 407, 408, 956, 2272, 957, 2267, 1631, 1684, 409, 2054, 3889, 958, 410, 2117, 411, 959, 412, 960, 2443, 4712, 4619, 2285, 413, 414, 415, 961, 2352, 2417, 962, 1905, 416, 963, 417, 418, 2382, 3675, 1833, 3974, 419, 964, 420, 421, 965, 966, 967, 968, 2365, 969, 970, 422, 1897, 2056, 2309, 4733, 1272, 4754, 2207, 971, 423, 4133, 3830, 4865, 972, 424, 973, 425, 4955, 426, 974, 2109, 2380, 427, 1708, 4676, 428, 4141, 429, 430, 3749, 431, 1619, 975, 4044, 3590, 1944, 4126, 1923, 1706, 432, 976, 977, 978, 4867, 4400, 433, 434, 1606, 979, 435, 980, 2604, 2895, 981, 436, 3448, 4959, 4563, 2188, 437, 438, 2055, 1692, 982, 2388, 2433, 2243, 983, 2035, 2120, 4940, 439, 440, 441, 2474, 442, 4900, 2052, 4764, 3862, 4055, 4358, 984, 2435, 4589, 2276, 2401, 985, 1664, 443, 2073, 2405, 986, 4309, 4045, 3854, 3682, 2491, 444, 445, 1972, 2688, 4366, 3425, 3231, 3649, 2759, 2724, 3873, 3755, 1216, 3599, 3775, 2754, 2606, 3471, 3234, 2565, 2803, 2562, 2684, 3411, 3405, 2690, 1255, 3694, 446, 3985, 3535, 1306, 4084, 3282, 447, 1353, 2168, 1780, 987, 988, 989, 2126, 448, 449, 2107, 450, 2031, 990, 451, 452, 991, 1485, 2242, 453, 2286, 992, 1728, 993, 4703, 994, 995, 454, 1696, 996, 2039, 997, 998, 3116, 1869, 456, 4759, 2500, 4798, 2262, 4562, 457, 1386, 999, 458, 4768, 4982, 4778, 2040, 1000, 4981, 3879, 2698, 459, 460, 1001, 461, 1447, 462, 1002, 2042, 2339, 1003, 463, 464, 4425, 1645, 465, 1004, 466, 2328, 467, 468, 469, 1231, 1468, 470, 471, 2496, 472, 473, 1005, 474, 2108, 4725, 1006, 476, 1273, 1007, 1744, 1488, 1659, 477, 478, 4598, 1604, 4753, 2493, 479, 1008, 1009, 1010, 1011, 1012, 1013, 1014, 481, 4313, 482, 483, 1499, 484, 1015, 4761, 2091, 2386, 2513, 1016, 4073, 1777, 2172, 485, 2205, 4592, 4545, 4720, 486, 1458, 4274, 2122, 4905, 5003, 4599, 4796, 2152, 4539, 4528, 4904, 4842, 4986, 4639, 4846, 4623, 4650, 4595, 2195, 4681, 2142, 487, 2182, 4710, 1775, 2083, 4205, 1526, 4586, 4602, 4518, 1697, 1017, 2000, 4692, 2480, 2017, 488, 2335, 489, 4969, 1894, 1882, 1817, 1880, 490, 1018, 3917, 3616, 4311, 1800, 4473, 4085, 4401, 1310, 3783, 3765, 1538, 3870, 491, 1948, 3699, 1735, 3792, 4290, 2074, 492, 2202, 5001, 2136, 493, 2211, 4532, 494, 2421, 495, 4090, 2378, 2210, 2247, 2478, 2047, 496, 4620, 4978, 1019, 2012, 1803, 3642, 497, 1322, 4752, 1020, 498, 1021, 2235, 2302, 2488, 4665, 4540, 5006, 4699, 4608, 4781, 499, 2049, 2404, 4685, 500, 501, 1022, 502, 1333, 503, 1023, 4686, 4804, 504, 4727, 505, 506, 4805, 2065, 1890, 1024, 507, 508, 509, 2110, 1025, 510, 1026, 3608, 1732, 511, 2397, 1864, 1816, 1531, 512, 513, 2451, 3636, 4892, 514, 1699, 4593, 1027, 4987, 515, 2495, 4660, 1028, 516, 1029, 2409, 1366, 2112, 2178, 2124, 2376, 5011, 4572, 4957, 4789, 4543, 4664, 4678, 4746, 2489, 4922, 2145, 1030, 4832, 4950, 1261, 4027, 3478, 3763, 2959, 1293, 2462, 517, 3197, 1595, 3413, 2238, 2067, 1031, 2228, 1448, 518, 4698, 4616, 2057, 2305, 2133, 2061, 4526, 4617, 1032, 1033, 2429, 2311, 1675, 4785, 1797, 519, 4578, 2271, 4693, 4604, 2466, 2148, 2420, 520, 4854, 2381, 2315, 2284, 4813, 521, 1034, 522, 523, 1999, 3759, 1215, 4122, 1730, 524, 525, 526, 3966, 4573, 5008, 1035, 527, 4973, 2508, 528, 3911, 529, 3289, 1821, 530, 531, 2426, 1036, 532, 1874, 533, 534, 1037, 1038, 536, 1039, 537, 538, 539, 1040, 3767, 1929, 1041, 1042, 3683, 2100, 4853, 2300, 2165, 540, 2105, 541, 4906, 542, 1338, 2292, 2021, 1616, 1901, 1796, 1517, 4331, 4332, 4466, 2719, 3803, 4123, 4233, 1824, 3129, 3087, 3505, 4158, 4254, 1449, 2121, 1044, 3720, 4351, 4414, 1673, 3453, 3254, 2501, 1649, 543, 544, 545, 546, 1045, 547, 2084, 2225, 4240, 3580, 4680, 1046, 548, 2062, 549, 1047, 550, 2598, 551, 552, 553, 3819, 1259, 4062, 1048, 554, 2841, 1049, 1050, 3515, 1433, 1323, 4301, 555, 556, 1051, 557, 558, 1052, 1053, 3738, 1567, 559, 1054, 1270, 3857, 1055, 2151, 560, 2175, 2089, 4514, 2198, 2193, 1257, 1238, 3662, 561, 2186, 1057, 562, 1058, 563, 4872, 2097, 2436, 564, 1059, 565, 566, 1060, 1061, 2231, 4203, 1899, 3981, 1062, 1303, 4116, 567, 1063, 568, 569, 570, 2367, 1946, 3620, 1064, 1514, 4002, 3679, 3964, 3707, 3666, 1348, 4273, 1804, 4497, 571, 1401, 4438, 1895, 1264, 572, 1912, 573, 3939, 4170, 4056, 1271, 1065, 1521, 1221, 1066, 1451, 1654, 1067, 3934, 4080, 4352, 574, 1700, 3739, 1565, 1419, 1811, 3950, 1690, 1397, 3716, 1569, 1437, 1674, 4337, 1285, 4268, 1183, 3726, 3881, 4134, 4347, 4012, 3938, 4066, 4198, 4416, 4164, 3630, 4229, 4292, 4193, 4325, 4375, 4371, 4432, 4215, 1753, 3944, 1409, 4195, 1729, 4223, 1540, 4455, 1068, 1069, 4512, 1723, 1070, 3750, 3633, 4070, 4104, 4162, 4235, 1863, 4346, 1881, 1071, 1814, 1572, 2418, 575, 4443, 3761, 1346, 1587, 1072, 3592, 576, 1891, 4469, 2430, 1275, 577, 1950, 1963, 4129, 1073, 1296, 1360, 1551, 3733, 4111, 3993, 4108, 3949, 1287, 1713, 1556, 1736, 1995, 1435, 1424, 1705, 1861, 1197, 1254, 4120, 1545, 4417, 1469, 1292, 2185, 1785, 1236, 4293, 1827, 3839, 3983, 4395, 1957, 578, 3928, 4295, 3715, 3855, 3609, 1990, 4076, 4175, 3927, 1757, 1650, 4299, 1773, 2004, 1267, 1364, 579, 1462, 1879, 4007, 3729, 3665, 3722, 1691, 1712, 1074, 1624, 1751, 1394, 3924, 3952, 580, 581, 2003, 1343, 2203, 1559, 1250, 1555, 2304, 582, 2395, 4114, 1818, 1075, 583, 1076, 1077, 1704, 4448, 584, 4882, 1078, 1079, 1786, 585, 3354, 1832, 586, 3432, 2891, 587, 588, 4583, 2505, 1903, 2077, 4936, 4658, 4830, 2446, 1080, 2278, 1081, 1082, 4459, 1083, 589, 1563, 1084, 2255, 2113, 590, 591, 1085, 2256, 592, 2308, 593, 594, 595, 4931, 2407, 1858, 596, 597, 598, 1453, 2559, 2590, 2738, 4478, 4069, 1809, 1327, 4150, 3260, 3481, 3672, 3625, 2008, 4439, 3852, 3997, 1411, 599, 3847, 4993, 1268, 4050, 3377, 4424, 1496, 4143, 4493, 3492, 1962, 1412, 2455, 600, 2457, 2321, 1086, 601, 4017, 4477, 1794, 2483, 4776, 2291, 602, 4263, 3072, 2009, 2199, 1754, 1087, 1088, 3888, 603, 604, 4777, 2324, 605, 1368, 3827, 4103, 606, 607, 1089, 2220, 4549, 1090, 1571, 1091, 1438, 608, 1092, 609, 2320, 2069, 610, 611, 1093, 612, 1094, 3701, 4389, 613, 4897, 1603, 614, 1095, 2154, 5000, 615, 616, 2263, 1332, 1715, 4369, 1652, 1096, 617, 1541, 618, 1921, 1733, 1373, 1870, 619, 4218, 1798, 2387, 1097, 1098, 1099, 1100, 620, 1702, 621, 622, 4801, 4855, 4847, 2398, 2239, 1101, 1667, 1384, 623, 4745, 3700, 1788, 1600, 624, 2098, 625, 4550, 4721, 4960, 2473, 4792, 4675, 1102, 1423, 626, 2771, 627, 1339, 3875, 628, 629, 3070, 4565, 2118, 2015, 4818, 4860, 2557, 2795, 2906, 2103, 4869, 2029, 3299, 3118, 4932, 4838, 4901, 4908, 4996, 4779, 2377, 4657, 4646, 4875, 4627, 4515, 4876, 4965, 4605, 4576, 2028, 4985, 4799, 4850, 1103, 4757, 4747, 1614, 1947, 2237, 630, 631, 4997, 4618, 4479, 3766, 632, 1104, 1105, 4886, 1106, 2432, 4827, 633, 1107, 4530, 634, 2371, 4651, 1108, 4536, 635, 1813, 636, 2431, 4866, 4991, 4814, 4560, 4956, 637, 4555, 1109, 4577, 4633, 2213, 638, 639, 3706, 1110, 640, 1111, 641, 4581, 4893, 4831, 2481, 4644, 4734, 2190, 4881, 4837, 4888, 4648, 642, 4548, 4807, 4896, 4868, 2374, 1112, 4823, 2164, 1113, 3735, 3390, 1694, 3431, 2838, 3483, 3464, 3848, 2558, 3314, 3086, 3029, 2956, 3517, 2651, 2914, 2680, 2632, 3121, 3100, 3528, 3526, 3084, 4220, 3304, 2846, 1186, 3235, 2903, 3559, 2687, 3409, 3237, 2900, 2999, 3349, 3171, 2752, 3262, 3504, 3047, 4376, 3193, 3430, 2525, 2670, 2911, 3508, 2776, 2697, 3200, 2790, 3323, 2543, 2874, 2614, 3904, 3373, 3054, 2617, 4242, 3621, 2708, 4179, 4398, 3959, 4935, 1269, 3095, 1286, 3624, 4481, 1432, 3511, 2735, 4381, 3295, 1585, 2390, 1568, 1114, 1766, 3221, 2643, 2739, 643, 4735, 4760, 4629, 1115, 4918, 4688, 3920, 644, 4723, 4949, 4607, 4719, 1116, 645, 646, 4611, 2353, 4645, 4603, 4762, 4819, 2221, 4636, 4992, 2307, 647, 1801, 4279, 3762, 1637, 1509, 4843, 4797, 4590, 4516, 4541, 2200, 4580, 4858, 648, 649, 1117, 4780, 4800, 2477, 4724, 4551, 4674, 1118, 1119, 2965, 2369, 2695, 3293, 650, 651, 4862, 4722, 4944, 1120, 652, 1121, 4983, 4784, 4877, 653, 654, 1122, 3264, 655, 2076, 4849, 656, 657, 2447, 658, 659, 2191, 4035, 2910, 3391, 2808, 3099, 2913, 3676, 2852, 3284, 2731, 1609, 2375, 3537, 3994, 1319, 4467, 1802, 1227, 1623, 660, 4844, 2086, 4770, 4714, 4979, 4812, 2192, 1123, 661, 2364, 662, 663, 664, 1124, 1125, 665, 2487, 4899, 2138, 1126, 666, 667, 4569, 4554, 4917, 2322, 1127, 1128, 1129, 668, 669, 1130, 670, 1131, 1527, 1132, 671, 1772, 2314, 1133, 1134, 2470, 1135, 672, 2236, 4716, 673, 4600, 2196, 674, 2456, 4606, 4588, 4963, 4851, 4558, 4557, 4697, 4610, 4773, 4687, 4708, 4910, 2123, 1136, 1137, 2358, 5005, 2208, 4952, 4945, 1933, 1731, 1793, 675, 676, 3342, 1138, 1139, 677, 4840, 4597, 4870, 1140, 4990, 4954, 4916, 678, 1141, 4737, 4527, 2253, 4531, 679, 1142, 1143, 680, 4771, 1144, 4638, 681, 4705, 4525, 4898, 2325, 2415, 5004, 1145, 682, 683, 2141, 1146, 684, 685, 2445, 686, 687, 4861, 2157, 688, 3822, 689, 690, 4743, 691, 1147, 1601, 692, 1148, 693, 4537, 4825, 4625, 4621, 3905, 694, 695, 1414, 1149, 696, 2027, 2159, 4756, 4690, 4859, 4793, 4575, 2160, 4828, 4731, 4802, 4750, 1150, 2081, 2258, 697, 1795, 1372, 1695, 1866, 1151, 4115, 1719, 2280, 4662, 698, 2176, 2194, 2217, 1920, 699, 700, 701, 4999, 1544, 4739, 2512, 702, 703, 4031, 4305, 1636, 1393, 2010, 3810, 4452, 3677, 4227, 1277, 1400, 4402, 4157, 4197, 1337, 1253, 1532, 4028, 3989, 2449, 4715, 704, 2050, 1493, 1854, 1902, 1510, 1152, 4824, 705, 2340, 4182, 706, 4652, 2442, 2484, 707, 708, 709, 4667, 1153, 2412, 4732, 4476, 2053, 710, 1375, 711, 712, 713, 4738, 4811, 4570, 4961, 1245, 714, 2045, 4707, 715, 2169, 4713, 4879, 1841, 4234, 4924, 1154, 1314, 4096, 2023, 716, 717, 4895, 2414, 718, 1155, 719, 720, 2063, 1311, 4921, 721, 4642, 722, 4833, 4903, 4885, 4666, 2249, 4217, 1156, 723, 1157, 1627, 2116, 2287, 1158, 2330, 4826, 4622, 4740, 724, 4700, 725, 1159, 5013, 4894, 726, 2434, 1953, 1160, 1201, 727, 3787, 2046, 1161, 728, 729, 2485, 2044, 4568, 3747, 2248, 730, 731, 2024, 1846, 2507, 2368, 1162, 2019, 2333, 3815, 2005, 2266, 1964, 2347, 2385, 732, 2177, 2059, 4958, 4927, 1822, 4815, 1262, 2094, 4480, 1537, 1291, 2419, 1318, 2283, 4976, 4628, 4294, 4926, 1582, 2162, 733, 4587, 734, 735, 3439, 2833, 4287, 4509, 4505, 4267, 3697, 3272, 4112, 2967, 3651, 1991, 1805, 1628, 3705, 2479, 736, 1195, 4863, 1163, 3859, 1164, 2394, 1165, 2355, 2351, 4835, 2259, 4571, 2275, 1166, 4968, 2250, 2423, 737, 1167, 4989, 4669, 4552, 4612, 2127, 1745, 1973, 4767, 1168, 2273, 2310, 3807, 4307, 1169, 2303, 1454, or 1781. In some aspects, the 581 to 589 region of the VP capsid polypeptide has a sequence of any one of SEQ ID NOs: 738, 739, 4177, 1289, 740, 14, 15, 741, 742, 743, 16, 744, 17, 18, 745, 3477, 1548, 3051, 2982, 2171, 2877, 746, 19, 20, 3036, 3426, 3073, 3169, 747, 2406, 3362, 2784, 2469, 4889, 21, 3192, 4942, 22, 23, 1638, 748, 24, 25, 749, 26, 27, 1703, 1836, 28, 2038, 2301, 3660, 29, 750, 30, 31, 2095, 1640, 33, 34, 35, 36, 37, 4742, 2450, 38, 4925, 39, 751, 752, 1653, 1205, 3795, 753, 4288, 4219, 2770, 2962, 4241, 4107, 2718, 3317, 4391, 4053, 3263, 2553, 3947, 2710, 2608, 3467, 2796, 2961, 2529, 3320, 2674, 2635, 3446, 3053, 3250, 3688, 1182, 1998, 4320, 3351, 2655, 3514, 2779, 3194, 3319, 3224, 3281, 3708, 2807, 3562, 3274, 3374, 3013, 3416, 2981, 3065, 2777, 3469, 2977, 2638, 2972, 3059, 2574, 3380, 4262, 3167, 3368, 2781, 3547, 3386, 1225, 2960, 3485, 3370, 3443, 2824, 754, 1467, 3327, 3178, 3006, 3252, 2991, 3470, 2888, 2572, 3418, 2642, 2519, 3363, 40, 2633, 41, 42, 43, 755, 2511, 44, 45, 756, 46, 757, 47, 48, 1952, 758, 2341, 2410, 49, 3122, 2551, 3718, 4806, 2216, 3484, 3577, 759, 2072, 2034, 50, 1308, 1230, 3960, 1378, 2994, 3080, 2589, 3681, 51, 2167, 52, 760, 53, 2389, 4755, 761, 4591, 762, 4659, 54, 2146, 3925, 55, 3654, 2087, 2346, 4766, 4682, 4984, 4744, 56, 763, 764, 4626, 4702, 57, 58, 59, 60, 61, 4086, 1740, 1660, 765, 766, 62, 1966, 2032, 2499, 2332, 767, 63, 2096, 2181, 4913, 2438, 2041, 64, 768, 769, 770, 2384, 2402, 771, 65, 66, 67, 772, 2458, 2197, 68, 3816, 69, 2599, 2706, 2497, 70, 2399, 71, 4769, 2366, 72, 73, 74, 3865, 1549, 1361, 2453, 3882, 773, 3713, 1942, 2140, 75, 1312, 4501, 76, 77, 774, 1413, 775, 776, 78, 1560, 4289, 3757, 79, 3593, 4043, 1806, 3908, 4397, 1615, 4415, 3723, 2006, 3754, 1470, 4360, 80, 3945, 2854, 3523, 3669, 1356, 777, 81, 82, 4065, 83, 84, 2030, 1294, 2413, 2064, 1484, 2299, 85, 4594, 86, 778, 87, 3891, 4456, 4040, 4496, 1982, 2001, 1478, 1189, 88, 1490, 1885, 1926, 89, 90, 91, 779, 2270, 780, 2161, 1180, 92, 781, 782, 783, 2356, 784, 785, 786, 94, 95, 788, 1831, 1867, 96, 4458, 97, 1970, 4656, 2173, 1936, 2349, 1590, 98, 99, 100, 789, 790, 1298, 101, 1688, 791, 792, 2007, 4556, 2070, 102, 793, 4632, 103, 794, 795, 104, 105, 106, 2229, 796, 4691, 107, 2440, 1849, 108, 797, 4736, 2509, 2018, 2227, 4787, 1579, 110, 1906, 111, 2428, 798, 2075, 112, 2411, 113, 2359, 799, 4848, 800, 2461, 1444, 2313, 2350, 4579, 4821, 801, 114, 2329, 4864, 4834, 115, 1344, 116, 802, 117, 118, 119, 4929, 4677, 120, 4791, 2158, 121, 803, 804, 1463, 805, 122, 2139, 2290, 1760, 2465, 123, 2424, 2058, 2230, 124, 4717, 806, 125, 126, 2370, 127, 4521, 128, 4971, 4994, 807, 4533, 129, 130, 131, 132, 4933, 808, 2336, 2026, 2204, 809, 810, 2281, 133, 1978, 134, 811, 812, 135, 136, 137, 138, 813, 814, 139, 4673, 140, 815, 1326, 141, 142, 143, 2344, 5009, 144, 145, 816, 4654, 2125, 4663, 4810, 4816, 1634, 1302, 817, 146, 818, 147, 148, 149, 4546, 150, 151, 152, 153, 154, 155, 819, 820, 156, 2149, 157, 2295, 821, 158, 160, 161, 4631, 2441, 162, 163, 164, 165, 166, 822, 167, 168, 169, 170, 171, 823, 172, 4613, 824, 1651, 173, 1483, 174, 175, 825, 176, 177, 178, 179, 4624, 4809, 4520, 180, 826, 827, 181, 828, 4695, 2130, 4911, 182, 4582, 4873, 2189, 183, 4641, 829, 184, 185, 2244, 4647, 186, 187, 188, 189, 190, 830, 191, 192, 193, 194, 2071, 4615, 2361, 195, 4852, 4914, 4947, 196, 1391, 197, 4534, 4726, 198, 199, 831, 2240, 2223, 200, 201, 202, 203, 2106, 2503, 4775, 204, 205, 832, 833, 206, 834, 2232, 2294, 207, 2166, 208, 209, 210, 835, 836, 1334, 837, 3901, 3312, 2649, 1301, 211, 212, 1450, 4386, 3028, 213, 1446, 214, 2206, 215, 1896, 1522, 3490, 838, 216, 2090, 2241, 217, 218, 4653, 219, 1612, 220, 221, 222, 839, 223, 4974, 4790, 4915, 2464, 4567, 4774, 4964, 2360, 840, 224, 4928, 4741, 225, 2088, 4751, 226, 227, 4890, 4519, 4883, 228, 4786, 229, 230, 231, 2448, 841, 842, 232, 233, 4782, 234, 2269, 843, 235, 844, 236, 237, 4930, 845, 846, 238, 847, 239, 848, 849, 2150, 850, 851, 852, 853, 1536, 240, 854, 241, 242, 243, 244, 245, 246, 247, 248, 4696, 855, 4634, 856, 249, 250, 251, 252, 253, 254, 255, 857, 2115, 2218, 256, 257, 258, 259, 858, 859, 260, 261, 860, 861, 862, 262, 4966, 863, 864, 263, 4749, 4970, 2296, 2318, 4535, 865, 2326, 264, 1241, 265, 266, 866, 1477, 267, 867, 268, 868, 269, 4668, 270, 869, 870, 271, 871, 872, 272, 4822, 4709, 873, 4655, 4972, 2317, 874, 1252, 273, 1591, 4975, 875, 274, 2025, 275, 1980, 276, 876, 877, 2066, 277, 278, 279, 4670, 280, 2323, 2288, 2334, 4939, 4689, 281, 878, 2416, 1892, 879, 1539, 2214, 2215, 880, 2327, 881, 882, 4601, 1295, 3601, 3877, 1930, 1420, 1678, 1460, 2306, 884, 282, 1799, 283, 284, 4988, 4871, 4553, 4772, 2260, 1626, 885, 286, 1374, 886, 2119, 2504, 2468, 287, 1620, 1290, 2425, 2482, 4564, 4671, 2282, 288, 1354, 2033, 289, 887, 290, 888, 291, 1956, 2362, 2467, 889, 2357, 4547, 4765, 292, 4794, 2391, 4324, 293, 890, 294, 295, 4138, 891, 2297, 2254, 296, 2224, 3903, 297, 892, 3829, 298, 299, 3809, 4271, 3844, 1436, 300, 1515, 1617, 301, 1961, 4649, 5010, 302, 2060, 303, 304, 305, 2452, 2147, 4574, 4538, 306, 2293, 1589, 893, 4946, 4370, 4841, 2342, 307, 308, 309, 894, 2246, 2155, 3646, 4059, 1431, 1331, 311, 4948, 312, 895, 1779, 313, 314, 315, 316, 896, 1558, 1552, 317, 2312, 318, 319, 897, 320, 898, 321, 322, 899, 1958, 2022, 2016, 900, 2454, 323, 2427, 2134, 324, 901, 325, 902, 326, 2373, 4803, 2459, 1491, 327, 328, 903, 2463, 2264, 329, 330, 1635, 4820, 905, 331, 4706, 4484, 1756, 906, 907, 4661, 2179, 4584, 4609, 332, 4907, 4635, 4529, 4683, 4561, 333, 3536, 2701, 2799, 3332, 3294, 3159, 3069, 2637, 3025, 2782, 3247, 3350, 2692, 2586, 3004, 3049, 2694, 2650, 3554, 2983, 3403, 3214, 3163, 2541, 3090, 3097, 3462, 1430, 2941, 3486, 2842, 3558, 3104, 3037, 3419, 2780, 2931, 1276, 2928, 2609, 3068, 3128, 2548, 2538, 2618, 2789, 3228, 2657, 3189, 2128, 2863, 3307, 3300, 2546, 3048, 3543, 2946, 2975, 3346, 3067, 2728, 2955, 3408, 3027, 3094, 3203, 2988, 2751, 2953, 2566, 2578, 2823, 3063, 3335, 3000, 3181, 3011, 3138, 3389, 2805, 3074, 2894, 3149, 2560, 3417, 3265, 3378, 2901, 2837, 2822, 2745, 3473, 3530, 3040, 2597, 3509, 3522, 3161, 2926, 3209, 3105, 3400, 2630, 2905, 2671, 2818, 2806, 2702, 2709, 2400, 3549, 3538, 2534, 2773, 2623, 3491, 3243, 3136, 2693, 3164, 3343, 2918, 2555, 2794, 2679, 3510, 3110, 2672, 3442, 2929, 3184, 3488, 2135, 4763, 3414, 3093, 2996, 3141, 3544, 3102, 2856, 2957, 3466, 3461, 2788, 2660, 3344, 3204, 2720, 3379, 2826, 1789, 2396, 2785, 3249, 3527, 4460, 3352, 2051, 2569, 4457, 2011, 4857, 2163, 4319, 3906, 1533, 1755, 1888, 4248, 1557, 3804, 1363, 1934, 1602, 1404, 4188, 1330, 4349, 3337, 3533, 2629, 3038, 2539, 3567, 3291, 3348, 3115, 3359, 2993, 3079, 3506, 2527, 2963, 2938, 2516, 3113, 1345, 2639, 3143, 3044, 2747, 3154, 3280, 3039, 2743, 2902, 3056, 2554, 2522, 3103, 3210, 3434, 2656, 4251, 4166, 4196, 3206, 3328, 2588, 3553, 2714, 3078, 3222, 3137, 3357, 2717, 2944, 3012, 3220, 3202, 2811, 3083, 3269, 3566, 2699, 2515, 3023, 2533, 3288, 3075, 3005, 2685, 3058, 2976, 2622, 3333, 3463, 2939, 3521, 3268, 3117, 2626, 2616, 3240, 2570, 3565, 2919, 3157, 2849, 3444, 2631, 3420, 2659, 3325, 3186, 2920, 3258, 3440, 3457, 3310, 2761, 3134, 2621, 3531, 2711, 2774, 2867, 2585, 3155, 2620, 3156, 2844, 3126, 3160, 2909, 3542, 3225, 2887, 3474, 3218, 2744, 2896, 3135, 3424, 3498, 3529, 2661, 2667, 2549, 2819, 2768, 2935, 3182, 2772, 3230, 3043, 2922, 3581, 3524, 2869, 2610, 3298, 2775, 3108, 2603, 3614, 2612, 2860, 3187, 3238, 3786, 4385, 3016, 3436, 2876, 2987, 3532, 3438, 3561, 3259, 2663, 2890, 3433, 3071, 3018, 2580, 2755, 3015, 2540, 3398, 2664, 2583, 2830, 2644, 2641, 3513, 2725, 2723, 3338, 3556, 2866, 2514, 2932, 2753, 2862, 2899, 2605, 2989, 3096, 3124, 2985, 2716, 3145, 3017, 2591, 2640, 3033, 1853, 3216, 3316, 3412, 2971, 3256, 3153, 3575, 3339, 2915, 2531, 3552, 3475, 3060, 3375, 2756, 3382, 2847, 2859, 3251, 3702, 3423, 2537, 2801, 3076, 2696, 3092, 3459, 3144, 3441, 2802, 3479, 2907, 3512, 3518, 3021, 2871, 3032, 2647, 2945, 3045, 2763, 3313, 3034, 3315, 3541, 2746, 2669, 2524, 3003, 2732, 3166, 3046, 3306, 2873, 3364, 3253, 3215, 3061, 2804, 2722, 2964, 2990, 2836, 4098, 4449, 3173, 2762, 3737, 2628, 3507, 2564, 3031, 2872, 3360, 2658, 2930, 2904, 3244, 3217, 3311, 3445, 2840, 3372, 2958, 3098, 3356, 3456, 3388, 2624, 3207, 2576, 2742, 2665, 2815, 3052, 3421, 2593, 3242, 2535, 2966, 2898, 2858, 2943, 2668, 2798, 3196, 2528, 2713, 3001, 2691, 2948, 2767, 2544, 3302, 2734, 2893, 2592, 2861, 3502, 2969, 2582, 3229, 2676, 2545, 3255, 3330, 2547, 3257, 2882, 3151, 3088, 2883, 3318, 2645, 2733, 2587, 3500, 3008, 2715, 2845, 3183, 2654, 3233, 3267, 2741, 2827, 2704, 3091, 2832, 2736, 3177, 3271, 2835, 2908, 3176, 2947, 3292, 3191, 2517, 3026, 3082, 3392, 3381, 2584, 2712, 3213, 3451, 2634, 3150, 2810, 3303, 2573, 3460, 2615, 3394, 2828, 3329, 4377, 4499, 3555, 2974, 3782, 3629, 3578, 3885, 2817, 3248, 2954, 3334, 3571, 3345, 3551, 3384, 3422, 1357, 1844, 2530, 2973, 4418, 4081, 3951, 1764, 1671, 1852, 334, 1843, 3449, 3185, 3399, 2786, 3055, 3472, 3397, 2601, 3564, 3277, 4373, 3548, 3179, 3407, 3841, 3347, 3142, 4255, 4431, 3241, 3077, 2700, 3147, 2648, 3283, 2829, 3278, 2581, 2536, 4363, 2848, 3410, 2797, 2523, 2520, 2721, 3496, 2571, 3198, 3219, 3030, 2673, 2921, 3837, 3301, 3322, 2705, 3239, 2949, 3369, 3396, 2892, 2897, 2766, 3174, 3297, 2550, 2889, 2933, 2793, 2627, 2677, 3119, 2596, 3226, 3172, 3089, 2868, 2839, 3942, 3120, 3286, 2843, 3465, 1564, 3946, 4222, 1504, 3999, 2682, 1875, 2865, 3539, 3168, 2864, 3308, 3557, 2940, 3109, 3503, 2625, 3455, 3114, 2595, 3331, 2978, 2518, 2521, 4079, 3024, 3573, 2952, 2653, 1769, 3180, 2813, 2652, 2600, 2816, 3201, 3188, 3270, 2997, 2992, 3009, 3520, 2936, 3275, 3165, 3447, 3131, 3305, 2809, 2792, 2729, 2814, 2619, 3266, 2825, 3066, 2857, 2998, 3064, 2681, 3035, 3279, 2764, 3480, 3127, 2912, 3010, 2607, 3211, 3111, 3041, 1573, 3909, 4269, 3487, 3489, 3019, 335, 1266, 1415, 2980, 3428, 3435, 3482, 3020, 2748, 2646, 2787, 2760, 2563, 3085, 3133, 3158, 3170, 2703, 3494, 2556, 2552, 3395, 3245, 3404, 2675, 2791, 2252, 4845, 1911, 4856, 2363, 908, 1935, 4711, 4728, 2460, 2749, 3341, 3355, 2575, 2942, 2886, 2758, 2594, 3495, 2884, 3516, 3042, 2737, 2923, 3563, 2855, 3476, 2611, 2937, 3383, 3497, 3402, 3162, 2662, 2875, 3223, 2878, 2079, 1808, 3285, 2757, 3057, 2951, 3519, 2579, 2853, 3387, 3401, 3493, 3393, 1608, 3365, 2885, 3574, 3081, 3007, 3568, 3152, 3367, 3358, 336, 2268, 3468, 3290, 3550, 3132, 2726, 2879, 3190, 3309, 2613, 2765, 3106, 1355, 3454, 2851, 2881, 3232, 3458, 3326, 3353, 2927, 3212, 2950, 3376, 3208, 3062, 3612, 3195, 3385, 2686, 2602, 3569, 3123, 2727, 1622, 2821, 2636, 2750, 2850, 3050, 2925, 3336, 3540, 2689, 3139, 2526, 3361, 3022, 3427, 3107, 3140, 3371, 3276, 2831, 3501, 2924, 3366, 3199, 3101, 3321, 3499, 2917, 2683, 2800, 2812, 3340, 3227, 3148, 3657, 4446, 1746, 1464, 1886, 2666, 3246, 3130, 3560, 3236, 2730, 3572, 1607, 3689, 2968, 1457, 1500, 337, 1184, 3450, 2577, 2567, 2532, 3415, 2934, 2984, 2568, 4147, 4943, 3002, 2986, 910, 2979, 2542, 2338, 2331, 2492, 1762, 4472, 1472, 1529, 2319, 4057, 4937, 2048, 4887, 1976, 4507, 1583, 338, 2078, 2372, 2102, 339, 911, 1711, 340, 912, 2013, 913, 2277, 914, 2403, 341, 915, 4902, 916, 342, 1594, 4440, 917, 343, 344, 4559, 918, 2439, 919, 345, 920, 346, 921, 922, 347, 2226, 348, 2180, 2298, 349, 350, 2099, 2036, 351, 4808, 923, 924, 4498, 1518, 3728, 3637, 3570, 3429, 4091, 2870, 2995, 4338, 3205, 2880, 3261, 1994, 3968, 4291, 4204, 4071, 4034, 1742, 2037, 352, 2820, 3912, 3287, 1218, 1190, 4145, 353, 2422, 354, 355, 925, 1782, 2184, 2261, 2490, 926, 927, 928, 4630, 2137, 3610, 356, 357, 4729, 358, 359, 4224, 1918, 1959, 1840, 3736, 1770, 929, 930, 931, 4155, 360, 361, 362, 932, 363, 364, 1279, 2289, 365, 1543, 366, 2156, 2472, 367, 4049, 1633, 1722, 368, 369, 1495, 1566, 370, 4967, 371, 372, 373, 1211, 1873, 2101, 2494, 1726, 374, 1442, 933, 1748, 4142, 1434, 1358, 1191, 3732, 4110, 4039, 4411, 4506, 4270, 4156, 3780, 4036, 4030, 4016, 1550, 3899, 1247, 1855, 1181, 3919, 1639, 3664, 1244, 4140, 3930, 4117, 4189, 4001, 3799, 3643, 3619, 1240, 1686, 1479, 1307, 1575, 4296, 1665, 3871, 4135, 1605, 4408, 3604, 1274, 4149, 1313, 3741, 1938, 3709, 1727, 3893, 1280, 3622, 1784, 3834, 1752, 1983, 1743, 3979, 4461, 4113, 3817, 4232, 1340, 1489, 4214, 3902, 1857, 2510, 2316, 1904, 1219, 1486, 1512, 1481, 1516, 3820, 3789, 4252, 4047, 4330, 4082, 4094, 1574, 1248, 4078, 1872, 1426, 3785, 3687, 4318, 4243, 3866, 3704, 4172, 1621, 4315, 1192, 1513, 1856, 2476, 3324, 2769, 2678, 1561, 3296, 375, 2348, 376, 377, 1395, 1584, 4093, 4453, 3940, 3778, 4374, 4210, 4009, 4264, 4339, 4368, 1738, 378, 1610, 4194, 4474, 4013, 4266, 1771, 1759, 1922, 3860, 3832, 1349, 1381, 3663, 1642, 1185, 4356, 3932, 1233, 4212, 3858, 1198, 4192, 3611, 1919, 1819, 3790, 3712, 1969, 4095, 1887, 4468, 1720, 4247, 934, 1790, 2002, 1657, 1663, 1336, 3894, 1554, 1494, 1405, 3576, 4314, 3695, 1851, 1850, 4362, 1815, 3845, 4511, 3656, 3638, 1406, 1596, 4454, 1443, 1661, 935, 4504, 1359, 1734, 3650, 1910, 1305, 1648, 3831, 4435, 1208, 1988, 4451, 1993, 1986, 3849, 1718, 4068, 1835, 1425, 1428, 1282, 4380, 1658, 1452, 1687, 4024, 379, 4072, 3791, 4491, 4323, 4014, 1304, 1440, 1511, 1981, 1676, 1547, 4422, 1283, 3861, 1383, 3644, 3691, 4259, 1749, 1418, 1176, 4216, 1387, 3992, 4423, 4253, 1618, 1871, 1256, 3748, 4119, 1297, 1586, 1251, 1299, 1954, 4450, 3990, 4029, 4097, 3890, 3796, 1389, 3711, 4344, 1578, 1476, 4343, 1202, 4413, 4384, 3808, 1647, 1475, 3892, 3674, 1739, 3926, 3595, 1943, 3756, 4405, 3973, 4109, 4159, 3744, 4387, 1960, 4275, 3781, 1535, 1210, 4492, 4365, 4118, 3655, 3886, 4278, 4383, 4485, 1392, 3751, 3931, 3986, 3678, 1249, 4353, 4208, 3710, 4238, 4213, 3969, 4436, 3175, 4128, 2970, 1228, 3534, 3437, 3406, 3641, 3639, 3954, 4335, 3995, 3582, 4475, 3784, 4470, 4010, 3802, 3941, 4427, 4396, 4348, 3587, 3818, 3864, 3956, 3863, 3731, 3814, 4067, 4354, 4350, 4334, 3821, 1932, 3929, 4171, 1258, 3824, 3631, 4465, 4494, 1320, 1398, 3828, 1204, 1223, 1284, 1685, 3773, 4209, 3014, 4462, 4246, 4190, 4312, 4023, 3760, 1178, 3884, 2783, 4038, 3545, 2916, 3112, 2834, 3880, 3673, 4102, 4399, 4048, 3752, 4207, 1235, 3943, 4355, 4087, 4100, 4327, 4037, 4163, 3918, 4486, 1243, 3933, 4178, 1662, 1643, 4152, 3634, 3617, 4445, 4303, 1370, 3838, 4199, 4284, 1213, 4382, 1399, 1187, 3714, 1828, 4487, 3615, 1842, 1501, 3746, 4018, 4420, 3606, 4121, 3724, 3935, 1941, 4419, 4282, 1955, 1949, 4310, 4488, 1577, 4127, 1288, 1171, 3670, 4052, 3627, 3777, 936, 1371, 3685, 1325, 1940, 380, 4482, 4258, 3812, 1581, 1860, 4124, 4508, 4500, 3652, 3972, 1309, 1630, 1528, 3717, 1217, 3692, 4430, 3764, 4316, 4285, 3645, 3971, 4421, 1172, 4026, 2740, 3125, 3546, 1206, 3842, 4404, 3690, 3962, 4513, 4340, 4329, 4410, 3703, 4136, 1763, 1487, 3589, 3907, 4153, 2707, 3730, 4426, 4180, 4041, 3923, 4444, 3851, 4429, 4361, 1441, 4394, 4302, 3758, 4510, 3742, 1868, 4077, 1710, 1939, 1335, 1666, 1407, 4187, 1193, 1188, 1196, 1724, 1717, 1200, 1646, 1997, 1975, 1701, 4280, 1613, 4006, 1984, 1351, 3653, 3833, 1593, 2561, 4442, 3900, 4298, 1761, 4388, 1820, 1597, 4317, 4249, 1341, 1203, 1680, 4441, 3628, 3725, 1945, 937, 4206, 1588, 1439, 3794, 4447, 1838, 3776, 3658, 4064, 1377, 4011, 4272, 4503, 1324, 1367, 3594, 3680, 1300, 1750, 938, 3913, 3774, 1877, 1987, 1862, 3998, 1380, 4185, 3686, 3696, 4463, 1350, 4008, 4230, 3853, 4244, 4083, 381, 1909, 3897, 1546, 382, 3613, 3273, 3452, 3525, 1229, 4105, 3835, 383, 1263, 1234, 3970, 1492, 3856, 3586, 1175, 4321, 4020, 4144, 1224, 1199, 3667, 2778, 4412, 4407, 1812, 1810, 3823, 1416, 1427, 1507, 1878, 4333, 3146, 4281, 4211, 1179, 3843, 1669, 1677, 1524, 1525, 1974, 384, 1979, 1456, 1239, 4167, 3740, 1876, 1388, 1967, 1474, 385, 1342, 1471, 4176, 1232, 1989, 4125, 1741, 1508, 1580, 4060, 4378, 1576, 1212, 1893, 3921, 3585, 1174, 1396, 4061, 4015, 1207, 3698, 3825, 3922, 4021, 4181, 1598, 1916, 1429, 4502, 4231, 1321, 4390, 3693, 3734, 1382, 3684, 1747, 3806, 3896, 3635, 1768, 4025, 3976, 3840, 3963, 4286, 1502, 3836, 4161, 3659, 3743, 4130, 3605, 1385, 1783, 4392, 4328, 1316, 4173, 4265, 1246, 1985, 1629, 1829, 1737, 3826, 1473, 1992, 1883, 1656, 1837, 1914, 1839, 1834, 3984, 4495, 3910, 4160, 3671, 4184, 4132, 4250, 1503, 1237, 1523, 1417, 4063, 1562, 3977, 1971, 1707, 1847, 1792, 3769, 4074, 1534, 4239, 4003, 3915, 1689, 1776, 1599, 1265, 1410, 1823, 1498, 1329, 939, 386, 387, 1655, 3874, 4261, 3626, 1791, 3579, 1644, 3936, 4054, 4260, 4359, 4131, 4297, 4357, 4022, 3770, 4046, 1222, 1996, 3788, 4169, 1925, 3953, 4228, 4226, 4277, 4101, 1889, 1369, 3797, 4088, 4019, 3771, 3632, 1402, 388, 1520, 1767, 1466, 1194, 4137, 1908, 1927, 1758, 3772, 3661, 4186, 4174, 1170, 3850, 1315, 1611, 1530, 1859, 2209, 4183, 1408, 1403, 941, 4033, 3623, 3596, 1461, 1848, 1173, 1928, 1459, 1765, 1826, 3719, 1931, 3584, 4004, 3591, 3967, 4168, 3957, 3878, 4165, 4191, 3980, 4058, 4200, 4336, 3958, 1260, 4051, 3798, 4032, 1774, 4322, 3991, 4106, 1641, 1570, 3978, 3965, 4464, 3813, 4154, 1365, 4257, 3846, 4345, 4379, 3603, 1693, 3937, 3801, 1787, 1214, 4483, 4201, 1898, 1845, 1226, 1220, 4245, 1347, 3867, 1900, 3640, 3916, 4089, 1209, 3745, 3988, 3975, 4236, 4075, 4146, 4256, 4308, 4000, 4148, 3588, 3868, 4403, 3883, 4326, 4393, 3895, 4237, 3955, 3727, 4005, 4092, 4372, 4283, 1553, 3805, 4151, 1281, 1681, 4489, 3982, 4437, 3597, 4342, 3872, 3987, 4490, 3876, 3668, 4300, 1679, 1242, 3598, 3583, 3647, 389, 4304, 3793, 3779, 1937, 1907, 4042, 3648, 3996, 3800, 4367, 4099, 1807, 3887, 4428, 1625, 1390, 1884, 1682, 4364, 4306, 3869, 1278, 1672, 942, 1505, 1542, 1709, 1915, 3600, 3914, 1968, 3948, 1670, 3811, 1865, 1362, 943, 1716, 3961, 1506, 4221, 1376, 944, 1683, 4276, 1445, 1721, 1632, 3607, 1328, 1455, 1913, 1497, 1317, 1951, 1778, 1379, 3768, 4225, 1668, 945, 390, 391, 4406, 4341, 1480, 392, 393, 394, 395, 1714, 1422, 396, 2043, 946, 2265, 397, 3618, 4433, 1177, 3898, 398, 2251, 947, 948, 2212, 949, 950, 399, 951, 400, 1965, 4640, 2345, 4471, 952, 953, 401, 2475, 403, 404, 4758, 954, 955, 2437, 4139, 1482, 3602, 4434, 3721, 1592, 1825, 1698, 1519, 1352, 4202, 4409, 1977, 1917, 405, 406, 407, 408, 956, 957, 2267, 1631, 1684, 409, 2054, 3889, 958, 410, 2117, 411, 959, 412, 960, 2443, 4712, 4619, 2285, 413, 414, 415, 961, 2352, 2417, 962, 1905, 416, 963, 417, 418, 2382, 3675, 1833, 3974, 419, 964, 420, 421, 965, 966, 967, 968, 2365, 969, 970, 422, 1897, 2056, 2309, 1272, 4754, 2207, 971, 423, 4133, 3830, 4865, 972, 424, 973, 425, 4955, 426, 974, 2109, 2380, 427, 1708, 4676, 428, 4141, 429, 430, 3749, 431, 1619, 975, 4044, 3590, 1944, 4126, 1923, 1706, 432, 976, 977, 978, 4867, 4400, 433, 434, 1606, 979, 435, 980, 2604, 2895, 981, 436, 3448, 4959, 4563, 2188, 437, 438, 2055, 1692, 982, 2388, 2243, 983, 2035, 2120, 4940, 439, 440, 441, 2474, 4900, 2052, 4764, 3862, 4055, 4358, 984, 2435, 4589, 2276, 2401, 985, 1664, 443, 2073, 2405, 986, 4309, 4045, 3854, 3682, 2491, 444, 445, 1972, 2688, 4366, 3425, 3231, 3649, 2759, 2724, 3873, 3755, 1216, 3599, 3775, 2754, 2606, 3471, 3234, 2565, 2803, 2562, 2684, 3411, 3405, 2690, 1255, 3694, 446, 3985, 3535, 1306, 4084, 3282, 447, 1353, 2168, 1780, 987, 988, 989, 2126, 448, 449, 2107, 450, 2031, 990, 451, 452, 991, 1485, 2242, 453, 2286, 992, 1728, 993, 4703, 994, 995, 454, 1696, 996, 2039, 997, 998, 3116, 1869, 456, 4759, 2500, 4798, 2262, 4562, 457, 1386, 999, 458, 4768, 4982, 4778, 2040, 1000, 4981, 3879, 2698, 459, 460, 1001, 461, 1447, 462, 1002, 2042, 2339, 1003, 463, 464, 4425, 1645, 465, 1004, 466, 2328, 467, 468, 469, 1231, 1468, 470, 471, 2496, 472, 473, 1005, 474, 2108, 4725, 1006, 476, 1273, 1007, 1744, 1488, 1659, 477, 478, 4598, 1604, 4753, 2493, 479, 1008, 1009, 1010, 1011, 1012, 1013, 1014, 481, 4313, 482, 483, 1499, 484, 1015, 4761, 2091, 2386, 2513, 1016, 4073, 1777, 2172, 485, 2205, 4592, 4545, 4720, 486, 1458, 4274, 2122, 4905, 4796, 2152, 4539, 4528, 4904, 4842, 4986, 4639, 4846, 4623, 4650, 4595, 2195, 4681, 487, 2182, 4710, 1775, 2083, 4205, 1526, 4586, 1697, 1017, 2000, 4692, 2480, 2017, 488, 2335, 489, 4969, 1894, 1882, 1817, 1880, 490, 1018, 3917, 3616, 4311, 1800, 4473, 4085, 4401, 1310, 3783, 3765, 1538, 3870, 491, 1948, 3699, 1735, 3792, 4290, 2074, 492, 5001, 2136, 493, 2211, 4532, 494, 2421, 495, 4090, 2378, 2210, 2247, 2478, 2047, 496, 4620, 4978, 1019, 2012, 1803, 3642, 497, 1322, 4752, 1020, 498, 1021, 2235, 2302, 2488, 4665, 4699, 4608, 4781, 499, 2049, 2404, 4685, 500, 501, 1022, 502, 1333, 503, 1023, 4686, 4804, 504, 4727, 505, 506, 4805, 2065, 1890, 1024, 507, 508, 509, 2110, 1025, 510, 1026, 3608, 1732, 511, 2397, 1864, 1816, 1531, 512, 513, 2451, 3636, 4892, 514, 1699, 4593, 1027, 4987, 515, 2495, 4660, 1028, 516, 1029, 2409, 1366, 2112, 2178, 2124, 2376, 5011, 4572, 4957, 4789, 4543, 4664, 4678, 4746, 2489, 4922, 2145, 1030, 4832, 4950, 1261, 4027, 3478, 3763, 2959, 1293, 2462, 517, 3197, 1595, 3413, 2067, 1031, 2228, 1448, 518, 4698, 4616, 2057, 2305, 2133, 2061, 4526, 4617, 1032, 1033, 2429, 2311, 1675, 1797, 519, 4578, 2271, 4693, 4604, 2466, 2148, 2420, 520, 4854, 2381, 2315, 2284, 4813, 521, 1034, 522, 523, 1999, 3759, 1215, 4122, 1730, 524, 525, 526, 3966, 4573, 5008, 1035, 527, 4973, 2508, 528, 3911, 529, 3289, 1821, 530, 531, 2426, 1036, 532, 1874, 533, 534, 1037, 1038, 536, 1039, 537, 538, 539, 1040, 3767, 1929, 1041, 1042, 3683, 2100, 4853, 2300, 2165, 540, 2105, 541, 4906, 542, 1338, 2292, 2021, 1616, 1901, 1796, 1517, 4331, 4332, 4466, 2719, 3803, 4123, 4233, 1824, 3129, 3087, 3505, 4158, 4254, 1449, 2121, 1044, 3720, 4351, 4414, 1673, 3453, 3254, 2501, 1649, 543, 544, 545, 546, 1045, 547, 2225, 4240, 3580, 4680, 1046, 548, 549, 1047, 550, 2598, 551, 552, 553, 3819, 1259, 4062, 1048, 554, 2841, 1049, 1050, 3515, 1433, 1323, 4301, 555, 556, 1051, 557, 558, 1052, 1053, 3738, 1567, 559, 1054, 1270, 3857, 1055, 2151, 560, 2175, 2089, 4514, 2198, 2193, 1257, 1238, 3662, 561, 2186, 1057, 562, 1058, 563, 4872, 2097, 2436, 564, 1059, 565, 566, 1060, 1061, 2231, 4203, 1899, 3981, 1062, 1303, 4116, 567, 1063, 568, 569, 570, 2367, 1946, 3620, 1064, 1514, 4002, 3679, 3964, 3707, 3666, 1348, 4273, 1804, 4497, 571, 1401, 4438, 1895, 1264, 572, 1912, 573, 3939, 4170, 4056, 1271, 1065, 1521, 1221, 1066, 1451, 1654, 3934, 4080, 4352, 574, 1700, 3739, 1565, 1419, 1811, 3950, 1690, 1397, 3716, 1569, 1437, 1674, 4337, 1285, 4268, 1183, 3726, 3881, 4134, 4347, 4012, 3938, 4066, 4198, 4416, 4164, 3630, 4229, 4292, 4193, 4325, 4375, 4371, 4432, 4215, 1753, 3944, 1409, 4195, 1729, 4223, 1540, 4455, 1068, 1069, 4512, 1723, 1070, 3750, 3633, 4070, 4104, 4162, 4235, 1863, 4346, 1881, 1071, 1814, 1572, 575, 4443, 3761, 1346, 1587, 1072, 3592, 576, 1891, 4469, 1275, 577, 1950, 1963, 4129, 1073, 1296, 1360, 1551, 3733, 4111, 3993, 4108, 3949, 1287, 1713, 1556, 1736, 1995, 1435, 1424, 1705, 1861, 1197, 1254, 4120, 1545, 4417, 1469, 1292, 2185, 1785, 1236, 4293, 1827, 3839, 3983, 4395, 1957, 578, 3928, 4295, 3715, 3855, 3609, 1990, 4076, 4175, 3927, 1757, 1650, 4299, 1773, 2004, 1267, 1364, 579, 1462, 1879, 4007, 3729, 3665, 3722, 1691, 1712, 1074, 1624, 1751, 1394, 3924, 3952, 580, 581, 2003, 1343, 2203, 1559, 1250, 1555, 2304, 582, 2395, 4114, 1818, 1075, 583, 1076, 1077, 1704, 4448, 584, 4882, 1078, 1079, 1786, 585, 3354, 1832, 586, 3432, 2891, 587, 588, 4583, 2505, 1903, 2077, 4936, 4658, 4830, 2446, 1080, 2278, 1081, 1082, 4459, 1083, 589, 1563, 1084, 2113, 590, 591, 1085, 2256, 592, 2308, 593, 594, 595, 4931, 2407, 1858, 597, 598, 1453, 2559, 2590, 2738, 4478, 4069, 1809, 1327, 4150, 3260, 3481, 3672, 3625, 2008, 4439, 3852, 3997, 1411, 599, 3847, 4993, 1268, 4050, 3377, 4424, 1496, 4143, 4493, 3492, 1962, 1412, 2455, 600, 2457, 2321, 1086, 601, 4017, 4477, 1794, 2483, 4776, 2291, 602, 4263, 3072, 2009, 2199, 1754, 1087, 1088, 3888, 603, 604, 4777, 2324, 605, 1368, 3827, 4103, 606, 607, 1089, 2220, 4549, 1090, 1571, 1091, 1438, 608, 1092, 609, 2320, 2069, 610, 611, 1093, 612, 1094, 3701, 4389, 613, 4897, 1603, 614, 1095, 2154, 5000, 615, 616, 2263, 1332, 1715, 4369, 1652, 1096, 617, 1541, 618, 1921, 1733, 1373, 1870, 619, 4218, 1798, 2387, 1097, 1098, 1099, 1100, 620, 1702, 621, 622, 4855, 4847, 2398, 2239, 1101, 1667, 1384, 623, 4745, 3700, 1788, 1600, 624, 2098, 625, 4550, 4721, 4960, 2473, 4792, 4675, 1102, 1423, 626, 2771, 627, 1339, 3875, 628, 629, 3070, 4565, 2118, 2015, 4818, 4860, 2557, 2795, 2906, 2103, 4869, 2029, 3299, 3118, 4932, 4838, 4901, 4908, 4996, 4779, 2377, 4657, 4646, 4875, 4627, 4515, 4876, 4965, 4605, 4576, 2028, 4985, 4799, 4850, 1103, 4757, 4747, 1614, 1947, 2237, 630, 631, 4997, 4618, 4479, 3766, 632, 1104, 1105, 4886, 1106, 2432, 4827, 633, 1107, 4530, 634, 2371, 1108, 4536, 635, 1813, 636, 2431, 4866, 4991, 4814, 4560, 4956, 637, 4555, 1109, 4633, 2213, 638, 639, 3706, 1110, 640, 1111, 641, 4581, 4893, 4831, 2481, 4644, 4734, 2190, 4881, 4837, 4888, 4648, 642, 4548, 4807, 4896, 4868, 2374, 1112, 4823, 2164, 1113, 3735, 3390, 1694, 3431, 2838, 3483, 3464, 3848, 2558, 3314, 3086, 3029, 2956, 3517, 2651, 2914, 2680, 2632, 3121, 3100, 3528, 3526, 3084, 4220, 3304, 2846, 1186, 3235, 2903, 3559, 2687, 3409, 3237, 2900, 2999, 3349, 3171, 2752, 3262, 3504, 3047, 4376, 3193, 3430, 2525, 2670, 2911, 3508, 2776, 2697, 3200, 2790, 3323, 2543, 2874, 2614, 3904, 3373, 3054, 2617, 4242, 3621, 2708, 4179, 4398, 3959, 4935, 1269, 3095, 1286, 3624, 4481, 1432, 3511, 2735, 4381, 3295, 1585, 2390, 1568, 1114, 1766, 3221, 2643, 2739, 643, 4735, 4629, 1115, 4918, 4688, 3920, 644, 4723, 4949, 4607, 4719, 1116, 645, 646, 4611, 2353, 4603, 4762, 4819, 2221, 4636, 4992, 2307, 647, 1801, 4279, 3762, 1637, 1509, 4843, 4797, 4590, 4516, 4541, 2200, 4580, 4858, 648, 649, 2477, 4724, 4551, 4674, 1118, 1119, 2965, 2369, 2695, 3293, 650, 651, 4862, 4722, 4944, 1120, 652, 1121, 4983, 4784, 4877, 653, 654, 1122, 3264, 655, 2076, 4849, 656, 657, 2447, 658, 659, 2191, 4035, 2910, 3391, 2808, 3099, 2913, 3676, 2852, 3284, 2731, 1609, 2375, 3537, 3994, 1319, 4467, 1802, 1227, 1623, 660, 4844, 4714, 4979, 4812, 2192, 1123, 661, 2364, 662, 663, 664, 1124, 1125, 665, 2487, 4899, 2138, 1126, 666, 667, 4569, 4917, 2322, 1127, 1128, 1129, 668, 669, 1130, 670, 1131, 1527, 1132, 671, 1772, 2314, 1133, 1134, 2470, 1135, 672, 2236, 4716, 673, 4600, 2196, 674, 2456, 4588, 4963, 4851, 4558, 4557, 4697, 4610, 4773, 4687, 4708, 4910, 2123, 1136, 1137, 2358, 5005, 2208, 4952, 4945, 1933, 1731, 1793, 675, 676, 3342, 1138, 1139, 677, 4840, 4597, 4870, 1140, 4990, 4954, 4916, 678, 1141, 4737, 4527, 2253, 4531, 679, 1142, 1143, 680, 4771, 1144, 4638, 681, 4705, 4525, 4898, 2325, 2415, 5004, 1145, 682, 683, 2141, 1146, 684, 685, 2445, 686, 687, 4861, 688, 3822, 689, 690, 4743, 691, 1147, 1601, 692, 1148, 693, 4537, 4825, 4625, 4621, 3905, 694, 695, 1414, 1149, 696, 2027, 2159, 4756, 4690, 4859, 4793, 4575, 2160, 4828, 4731, 4802, 4750, 1150, 2081, 2258, 697, 1795, 1372, 1695, 1866, 1151, 4115, 1719, 2280, 4662, 698, 2176, 2217, 1920, 699, 700, 701, 4999, 1544, 4739, 2512, 702, 703, 4031, 4305, 1636, 1393, 2010, 3810, 4452, 3677, 4227, 1277, 1400, 4402, 4157, 4197, 1337, 1253, 1532, 4028, 3989, 2449, 4715, 704, 2050, 1493, 1854, 1902, 1510, 1152, 2340, 4182, 706, 4652, 2442, 2484, 707, 708, 709, 4667, 1153, 2412, 4732, 4476, 2053, 710, 1375, 711, 712, 713, 4738, 4811, 4570, 1245, 714, 2045, 4707, 715, 2169, 4713, 1841, 4234, 4924, 1154, 1314, 4096, 2023, 717, 4895, 2414, 718, 1155, 719, 720, 2063, 1311, 4921, 721, 4833, 4903, 4885, 4666, 2249, 4217, 1156, 723, 1157, 1627, 2116, 2287, 1158, 2330, 4826, 4622, 4740, 724, 4700, 725, 1159, 5013, 4894, 726, 2434, 1953, 1160, 1201, 727, 3787, 2046, 1161, 728, 729, 2485, 2044, 4568, 3747, 2248, 730, 731, 1846, 2507, 2368, 1162, 2019, 2333, 3815, 2005, 2266, 1964, 2347, 732, 2177, 2059, 4958, 4927, 1822, 4815, 1262, 2094, 4480, 1537, 1291, 2419, 1318, 4628, 4294, 4926, 1582, 2162, 733, 4587, 734, 735, 3439, 2833, 4287, 4509, 4505, 4267, 3697, 3272, 4112, 2967, 3651, 1991, 1805, 1628, 3705, 2479, 736, 1195, 4863, 1163, 3859, 1164, 2394, 1165, 2355, 2351, 4835, 2259, 2275, 1166, 4968, 2423, 737, 1167, 4989, 4612, 2127, 1745, 1973, 4767, 1168, 2273, 2310, 3807, 4307, 1169, 2303, 1454, or 1781.

[0019] In some aspects, (a) X³ of SEQ ID NO: 5014 is not E, (b) X⁶ of SEQ ID NO: 5014 is not E, or (c) X³ of SEQ ID NO: 5014 is not E and X⁶ of SEQ ID NO: 5014 is not E. In some aspects, the 581 to 589 region of the VP capsid polypeptide has a sequence of any one of SEQ ID NOs: 2498, 4884, 738, 739, 4177, 1289, 740, 14, 15, 741, 742, 743, 16, 744, 17, 18, 745, 3477, 1548, 3051, 2982, 2171, 2877, 746, 19, 20, 3036, 3426, 3073, 3169, 747, 2406, 3362, 2784, 4889, 21, 3192, 4942, 22, 23, 1638, 748, 24, 25, 749, 26, 27, 1703, 1836, 28, 2038, 2301, 3660, 29, 750, 30, 31, 32, 2095, 1640, 33, 34, 35, 36, 37, 4742, 2450, 38, 4925, 39, 751, 752, 1653, 1205, 3795, 753, 4288, 4219, 2770, 2962, 4241, 4107, 2718, 3317, 4391, 4053, 3263, 2553, 3947, 2710, 2608, 3467, 2796, 2961, 2529, 3320, 2674, 2635, 3446, 3053, 3250, 3688, 1182, 1998, 4320, 3351, 2655, 3514, 2779, 3194, 3319, 3224, 3281, 3708, 2807, 3562, 3274, 3374, 3013, 3416, 2981, 3065, 2777, 3469, 2977, 2638, 2972, 3059, 2574, 3380, 4262, 3167, 3368, 2781, 3547, 3386, 1225, 2960, 3485, 3370, 3443, 2824, 754, 1467, 3327, 3178, 3006, 3252, 2991, 3470, 2888, 2572, 3418, 2642, 2519, 3363, 40, 2633, 41, 42, 43, 755, 2511, 44, 45, 756, 46, 757, 47, 48, 1952, 758, 2341, 2410, 49, 3122, 2551, 3718, 4806, 2216, 3484, 3577, 759, 2080, 2072, 2034, 50, 1308, 1230, 3960, 1378, 2994, 3080, 2589, 3681, 51, 4694, 2257, 52, 760, 53, 2389, 4934, 4951, 761, 4591, 762, 4659, 54, 2146, 3925, 55, 3654, 2087, 2346, 4766, 4682, 4984, 4744, 56, 763, 764, 4626, 4702, 57, 58, 59, 60, 61, 4086, 1740, 1660, 765, 766, 62, 1966, 2032, 2499, 2332, 767, 63, 2096, 2181, 4913, 64, 768, 769, 770, 2384, 2402, 771, 65, 66, 2111, 67, 772, 2458, 2197, 68, 3816, 69, 2599, 2706, 2497, 70, 2234, 2183, 2399, 71, 4769, 2366, 72, 73, 74, 3865, 1549, 1361, 2453, 3882, 773, 3713, 1942, 2140, 75, 1312, 4501, 76, 77, 774, 1413, 775, 776, 78, 1560, 4289, 3757, 79, 3593, 4043, 1806, 3908, 4397, 1615, 4415, 3723, 2006, 3754, 1470, 4360, 80, 3945, 2854, 3523, 3669, 1356, 777, 2132, 2379, 81, 82, 4065, 83, 84, 2030, 1294, 2413, 2064, 1484, 85, 4594, 86, 778, 87, 3891, 4456, 4040, 4496, 1982, 2001, 1478, 1189, 88, 1490, 1885, 1926, 89, 90, 91, 779, 2270, 780, 2161, 1180, 92, 781, 782, 783, 93, 2356, 784, 785, 786, 94, 95, 787, 788, 1831, 1867, 96, 4458, 97, 1970, 4656, 2173, 1936, 2349, 1590, 4585, 98, 99, 100, 789, 790, 1298, 101, 1688, 791, 792, 2007, 4556, 2070, 102, 793, 4632, 103, 794, 795, 104, 105, 106, 2229, 796, 4980, 4691, 107, 2440, 1849, 108, 2014, 797, 4736, 2509, 2018, 2227, 4787, 109, 1579, 110, 1906, 111, 2428, 798, 2075, 112, 2411, 113, 2359, 799, 4848, 800, 2461, 1444, 2313, 2350, 4579, 4821, 801, 114, 2329, 4834, 115, 1344, 116, 802, 117, 118, 119, 4929, 4677, 120, 2158, 121, 803, 804, 1463, 805, 122, 2139, 2290, 1760, 2465, 123, 2424, 2058, 2230, 124, 4717, 806, 125, 126, 2370, 127, 4521, 128, 4971, 4994, 807, 2085, 4533, 129, 130, 131, 132, 4933, 808, 2336, 2026, 2204, 809, 810, 2281, 133, 1978, 134, 811, 812, 135, 136, 137, 138, 813, 814, 139, 4673, 140, 815, 1326, 141, 142, 143, 2344, 4544, 5009, 144, 145, 816, 4654, 4816, 1634, 1302, 817, 146, 818, 147, 148, 149, 4546, 150, 151, 152, 153, 154, 155, 819, 820, 156, 2149, 157, 2295, 821, 158, 159, 160, 161, 4631, 2441, 162, 163, 164, 165, 166, 822, 167, 168, 169, 170, 171, 823, 172, 4613, 824, 1651, 173, 1483, 174, 175, 825, 176, 177, 178, 179, 4624, 2170, 4809, 4520, 180, 826, 827, 181, 828, 4695, 4911, 182, 4582, 4873, 4596, 2020, 183, 4641, 829, 184, 185, 2244, 4647, 186, 187, 188, 189, 190, 2114, 830, 191, 192, 193, 194, 2071, 4615, 2361, 195, 4852, 2187, 4914, 4947, 196, 1391, 197, 4534, 4726, 4788, 198, 199, 4920, 831, 2240, 2223, 200, 201, 202, 203, 2106, 2503, 4775, 204, 205, 832, 833, 206, 834, 2232, 2294, 207, 2166, 208, 209, 210, 835, 836, 1334, 837, 3901, 3312, 2649, 1301, 211, 212, 1450, 4386, 3028, 213, 1446, 214, 2206, 215, 1896, 1522, 3490, 838, 216, 2241, 217, 218, 4653, 219, 1612, 220, 221, 222, 839, 223, 4953, 2360, 840, 224, 4928, 4741, 225, 2088, 4751, 5007, 4542, 226, 227, 4890, 4519, 4883, 228, 4786, 229, 230, 231, 2393, 2448, 841, 842, 232, 233, 4782, 234, 4962, 2269, 843, 235, 844, 236, 237, 4930, 845, 846, 238, 847, 4704, 239, 848, 849, 2150, 850, 851, 852, 853, 1536, 240, 854, 241, 242, 243, 244, 245, 246, 247, 248, 4923, 2245, 4696, 855, 4634, 856, 249, 250, 251, 252, 253, 254, 255, 857, 2115, 4880, 2218, 256, 257, 258, 259, 858, 859, 260, 261, 860, 861, 862, 262, 4966, 863, 864, 263, 4749, 4970, 2296, 2318, 865, 2326, 264, 1241, 265, 266, 866, 1477, 267, 867, 4977, 268, 868, 269, 4668, 5002, 270, 869, 870, 271, 871, 872, 272, 4822, 4709, 873, 4655, 4972, 2392, 874, 1252, 273, 1591, 4975, 875, 274, 2025, 275, 1980, 276, 876, 877, 2066, 277, 278, 279, 4670, 280, 2323, 2288, 2334, 4939, 4689, 281, 878, 1892, 879, 1539, 2214, 2215, 880, 2327, 881, 882, 4601, 883, 1295, 3601, 3877, 1930, 1420, 1678, 1460, 2306, 884, 282, 1799, 283, 284, 4988, 4553, 4772, 4817, 2260, 285, 1626, 2082, 885, 286, 1374, 886, 2119, 2468, 287, 2408, 1620, 1290, 2425, 2482, 4564, 4671, 2282, 288, 2354, 1354, 2033, 289, 887, 290, 888, 291, 1956, 2362, 2467, 889, 2357, 4547, 4765, 292, 4794, 2391, 4324, 293, 890, 294, 295, 4138, 891, 2297, 2254, 296, 2224, 3903, 297, 892, 3829, 298, 299, 3809, 4271, 3844, 1436, 300, 1515, 1617, 4701, 2174, 301, 1961, 4649, 5010, 302, 303, 304, 305, 2452, 2147, 306, 2293, 1589, 893, 4370, 4841, 2342, 307, 308, 309, 894, 2246, 2155, 3646, 4059, 1431, 1331, 310, 311, 4836, 4948, 312, 895, 1779, 313, 314, 315, 316, 896, 1558, 1552, 317, 2312, 318, 319, 897, 320, 898, 321, 322, 899, 1958, 2022, 2016, 900, 2454, 323, 2427, 2134, 324, 901, 325, 902, 326, 2373, 4803, 2459, 1491, 327, 328, 903, 2463, 2264, 329, 330, 904, 1635, 4820, 905, 2506, 331, 4706, 2092, 4484, 1756, 906, 907, 4661, 2179, 4584, 4609, 332, 4907, 4635, 4529, 4683, 4523, 4561, 333, 2337, 3536, 2701, 2799, 3332, 3294, 3159, 3069, 2637, 3025, 2782, 3247, 3350, 2692, 2586, 3004, 3049, 2694, 2650, 3554, 2983, 3403, 3214, 3163, 2541, 3090, 3097, 3462, 1430, 2941, 3486, 2842, 3558, 3104, 3037, 3419, 2780, 2931, 1276, 2928, 2609, 3068, 3128, 2548, 2538, 2618, 2789, 3228, 2657, 3189, 2128, 2863, 3307, 3300, 2546, 3048, 3543, 2946, 2975, 3346, 3067, 2728, 2955, 3408, 3027, 3094, 3203, 2988, 2751, 2953, 2566, 2578, 2823, 3063, 3335, 3000, 3181, 3011, 3138, 3389, 2805, 3074, 2894, 3149, 2560, 3417, 3265, 3378, 2901, 2837, 2822, 2745, 3473, 3530, 3040, 2597, 3509, 3522, 3161, 2926, 3209, 3105, 3400, 2630, 2905, 2671, 2818, 2806, 2702, 2709, 2400, 3549, 3538, 2534, 2773, 2623, 3491, 3243, 3136, 2693, 3164, 3343, 2918, 2555, 2794, 2679, 3510, 3110, 2672, 3442, 2929, 3184, 3488, 2135, 4763, 3414, 3093, 2996, 3141, 3544, 3102, 2856, 2957, 3466, 3461, 2788, 2660, 3344, 3204, 2720, 3379, 2826, 1789, 2396, 2785, 3249, 3527, 4460, 3352, 2051, 2569, 4457, 2011, 4857, 2163, 4783, 4319, 3906, 1533, 1755, 1888, 4248, 1557, 2153, 3804, 1363, 1934, 1602, 1404, 4188, 1330, 4349, 3337, 3533, 2629, 3038, 2539, 3567, 3291, 3348, 3115, 3359, 2993, 3079, 3506, 2527, 2963, 2938, 2516, 3113, 1345, 2639, 3143, 3044, 2747, 3154, 3280, 3039, 2743, 2902, 3056, 2554, 2522, 3103, 3210, 3434, 2656, 4251, 4166, 4196, 3206, 3328, 2588, 3553, 2714, 3078, 3222, 3137, 3357, 2717, 2944, 3012, 3220, 3202, 2811, 3083, 3269, 3566, 2699, 2515, 3023, 2533, 3288, 3075, 3005, 2685, 3058, 2976, 2622, 3333, 3463, 2939, 3521, 3268, 3117, 2626, 2616, 3240, 2570, 3565, 2919, 3157, 2849, 3444, 2631, 3420, 2659, 3325, 3186, 2920, 3258, 3440, 3457, 3310, 2761, 3134, 2621, 3531, 2711, 2774, 2867, 2585, 3155, 2620, 3156, 2844, 3126, 3160, 2909, 3542, 3225, 2887, 3474, 3218, 2744, 2896, 3135, 3424, 3498, 3529, 2661, 2667, 2549, 2819, 2768, 2935, 3182, 2772, 3230, 3043, 2922, 3581, 3524, 2869, 2610, 3298, 2775, 3108, 2603, 3614, 2612, 2860, 3187, 3238, 3786, 4385, 3016, 3436, 2876, 2987, 3532, 3438, 3561, 3259, 2663, 2890, 3433, 3071, 3018, 2580, 2755, 3015, 2540, 3398, 2664, 2583, 2830, 2644, 2641, 3513, 2725, 2723, 3338, 3556, 2866, 2514, 2932, 2753, 2862, 2899, 2605, 2989, 3096, 3124, 2985, 2716, 3145, 3017, 2591, 2640, 3033, 1853, 3216, 3316, 3412, 2971, 3256, 3153, 3575, 3339, 2915, 2531, 3552, 3475, 3060, 3375, 2756, 3382, 2847, 2859, 3251, 3702, 3423, 2537, 2801, 3076, 2696, 3092, 3459, 3144, 3441, 2802, 3479, 2907, 3512, 3518, 3021, 2871, 3032, 2647, 2945, 3045, 2763, 3313, 3034, 3315, 3541, 2746, 2669, 2524, 3003, 2732, 3166, 3046, 3306, 2873, 3364, 3253, 3215, 3061, 2804, 2722, 2964, 2990, 2836, 4098, 4449, 3173, 2762, 3737, 2628, 3507, 2564, 3031, 2872, 3360, 2658, 2930, 2904, 3244, 3217, 3311, 3445, 2840, 3372, 2958, 3098, 3356, 3456, 3388, 2624, 3207, 2576, 2742, 2665, 2815, 3052, 3421, 2593, 3242, 2535, 2966, 2898, 2858, 2943, 2668, 2798, 3196, 2528, 2713, 3001, 2691, 2948, 2767, 2544, 3302, 2734, 2893, 2592, 2861, 3502, 2969, 2582, 3229, 2676, 2545, 3255, 3330, 2547, 3257, 2882, 3151, 3088, 2883, 3318, 2645, 2733, 2587, 3500, 3008, 2715, 2845, 3183, 2654, 3233, 3267, 2741, 2827, 2704, 3091, 2832, 2736, 3177, 3271, 2835, 2908, 3176, 2947, 3292, 3191, 2517, 3026, 3082, 3392, 3381, 2584, 2712, 3213, 3451, 2634, 3150, 2810, 3303, 2573, 3460, 2615, 3394, 2828, 3329, 4377, 4499, 3555, 2974, 3782, 3629, 3578, 3885, 2817, 3248, 2954, 3334, 3571, 3345, 3551, 3384, 3422, 1357, 1844, 2530, 2973, 4418, 4081, 3951, 1764, 1671, 1852, 334, 1843, 3449, 3185, 3399, 2786, 3055, 3472, 3397, 2601, 3564, 3277, 4373, 3548, 3179, 3407, 3841, 3347, 3142, 4255, 4431, 3241, 3077, 2700, 3147, 2648, 3283, 2829, 3278, 2581, 2536, 4363, 2848, 3410, 2797, 2523, 2520, 2721, 3496, 2571, 3198, 3219, 3030, 2673, 2921, 3837, 3301, 3322, 2705, 3239, 2949, 3369, 3396, 2892, 2897, 2766, 3174, 3297, 2550, 2889, 2933, 2793, 2627, 2677, 3119, 2596, 3226, 3172, 3089, 2868, 2839, 3942, 3120, 3286, 2843, 3465, 1564, 3946, 4222, 1504, 3999, 2682, 1875, 2865, 3539, 3168, 2864, 3308, 3557, 2940, 3109, 3503, 2625, 3455, 3114, 2595, 3331, 2978, 2518, 2521, 4079, 3024, 3573, 2952, 2653, 1769, 3180, 2813, 2652, 2600, 2816, 3201, 3188, 3270, 2997, 2992, 3009, 3520, 2936, 3275, 3165, 3447, 3131, 3305, 2809, 2792, 2729, 2814, 2619, 3266, 2825, 3066, 2857, 2998, 3064, 2681, 3035, 3279, 2764, 3480, 3127, 2912, 3010, 2607, 3211, 3111, 3041, 1573, 3909, 4269, 3487, 3489, 3019, 335, 1266, 1415, 2980, 3428, 2444, 3435, 3482, 3020, 2748, 2646, 2787, 2760, 2563, 3085, 3133, 3158, 3170, 2703, 3494, 2556, 2552, 3395, 3245, 3404, 2675, 2791, 2252, 4845, 1911, 4856, 2363, 908, 1935, 4711, 4728, 2460, 4517, 2749, 3341, 3355, 2575, 2942, 2886, 2758, 2594, 3495, 2884, 3516, 3042, 2737, 2923, 3563, 2855, 3476, 2611, 2937, 3383, 3497, 3402, 3162, 2662, 2875, 3223, 2878, 2079, 1808, 3285, 2757, 3057, 2951, 3519, 2579, 2853, 3387, 3401, 3493, 3393, 1608, 3365, 2885, 3574, 3081, 3007, 3568, 3152, 3367, 3358, 336, 2268, 3468, 3290, 3550, 3132, 2726, 2879, 3190, 3309, 2613, 2765, 3106, 1355, 3454, 2851, 2881, 3232, 3458, 3326, 3353, 2927, 3212, 2950, 3376, 3208, 3062, 3612, 3195, 3385, 2686, 2602, 3569, 3123, 2727, 1622, 2821, 2636, 2750, 2850, 3050, 2925, 3336, 3540, 2689, 3139, 2526, 3361, 3022, 3427, 3107, 3140, 3371, 3276, 2831, 3501, 2924, 3366, 3199, 3101, 3321, 3499, 2917, 2683, 2800, 2812, 3340, 3227, 3148, 3657, 4446, 1746, 1464, 1886, 2666, 3246, 3130, 3560, 3236, 2730, 3572, 1607, 3689, 2968, 1457, 1500, 909, 337, 1184, 3450, 2577, 2567, 2532, 3415, 2934, 2984, 2568, 4147, 3002, 2986, 910, 2979, 2542, 2338, 2492, 1762, 4472, 1472, 1529, 2319, 2131, 4057, 4937, 2048, 1976, 4507, 1583, 338, 2078, 2372, 339, 911, 1711, 340, 912, 2013, 913, 2277, 914, 2403, 341, 915, 4672, 4902, 916, 342, 1594, 4440, 917, 343, 344, 4559, 918, 2233, 919, 345, 920, 346, 921, 922, 347, 2226, 348, 2180, 2298, 349, 350, 2099, 2036, 351, 4808, 923, 924, 4498, 1518, 3728, 3637, 3570, 3429, 4091, 2870, 2995, 4338, 3205, 2880, 3261, 1994, 3968, 4291, 4204, 4071, 4034, 1742, 2037, 352, 2820, 3912, 3287, 1218, 1190, 4145, 353, 2422, 354, 355, 925, 1782, 2184, 2261, 2490, 926, 927, 928, 4630, 2137, 3610, 356, 357, 4729, 358, 359, 4224, 1918, 1959, 1840, 3736, 2471, 1770, 929, 930, 931, 4155, 360, 361, 362, 932, 363, 364, 1279, 2289, 365, 1543, 366, 2156, 2472, 367, 4049, 1633, 1722, 368, 369, 1495, 1566, 370, 4967, 371, 372, 373, 1211, 1873, 2101, 2494, 1726, 374, 1442, 933, 1748, 4142, 1434, 1358, 1191, 3732, 4110, 4039, 4411, 4506, 4270, 4156, 3780, 4036, 4030, 4016, 1550, 3899, 1247, 1855, 1181, 3919, 1639, 3664, 1244, 4140, 3930, 4117, 4189, 4001, 3799, 3643, 3619, 1240, 1686, 1479, 1307, 1575, 4296, 1665, 3871, 4135, 1605, 4408, 3604, 1274, 4149, 1313, 3741, 1938, 3709, 1727, 3893, 1280, 3622, 1784, 3834, 1752, 1983, 1743, 3979, 4461, 4113, 3817, 4232, 1340, 1489, 4214, 3902, 1857, 2510, 2316, 1904, 1219, 1486, 1512, 1481, 1516, 3820, 3789, 4252, 4047, 4330, 4082, 4094, 1574, 1248, 4078, 1872, 1426, 3785, 3687, 4318, 4243, 3866, 3704, 4172, 1621, 4315, 1192, 1513, 1856, 2476, 3324, 2769, 2678, 1561, 3296, 375, 2343, 376, 377, 1395, 1584, 4093, 4453, 3940, 3778, 4374, 4210, 4009, 4264, 4339, 4368, 1738, 378, 1610, 4194, 4474, 4013, 4266, 1771, 1759, 1922, 3860, 3832, 1349, 1381, 3663, 1642, 1185, 4356, 3932, 1233, 4212, 3858, 1198, 4192, 3611, 1919, 1819, 3790, 3712, 1969, 4095, 1887, 4468, 1720, 4247, 934, 1790, 2002, 1657, 1663, 1336, 3894, 1554, 1494, 1405, 3576, 4314, 3695, 1851, 1850, 4362, 1815, 3845, 4511, 3656, 3638, 1406, 1596, 4454, 1443, 1661, 935, 4504, 1359, 1734, 3650, 1910, 1305, 1648, 3831, 4435, 1208, 1988, 4451, 1993, 1986, 3849, 1718, 4068, 1835, 1425, 1428, 1282, 4380, 1658, 1452, 1687, 4024, 379, 4072, 3791, 4491, 4323, 4014, 1304, 1440, 1511, 1981, 1676, 1547, 4422, 1283, 3861, 1383, 3644, 3691, 4259, 1749, 1418, 1176, 4216, 1924, 1421, 3992, 4423, 4253, 1618, 1871, 1256, 3748, 4119, 1297, 1586, 1251, 1299, 1954, 4450, 3990, 4029, 4097, 3890, 3796, 1389, 3711, 4344, 1578, 1476, 4343, 1202, 4413, 4384, 3808, 1647, 1475, 3892, 3674, 1739, 3926, 3595, 1943, 3756, 4405, 3973, 4109, 4159, 3744, 4387, 1960, 4275, 3781, 1535, 1210, 4492, 4365, 4118, 3655, 3886, 4278, 4383, 4485, 1392, 3751, 3931, 3986, 3678, 1249, 4353, 4208, 3710, 4238, 4213, 3969, 4436, 3175, 4128, 2970, 1228, 3534, 3437, 3406, 3641, 3639, 3954, 4335, 3995, 3582, 4475, 3784, 4470, 4010, 3802, 3941, 4427, 4396, 4348, 3587, 3818, 3864, 3956, 3863, 3731, 3814, 4067, 4354, 4350, 4334, 3821, 1932, 3929, 4171, 1258, 3824, 3631, 4465, 4494, 1320, 1398, 3828, 1204, 1223, 1284, 1685, 3773, 4209, 3014, 4462, 4246, 4190, 4312, 4023, 3760, 3753, 1178, 3884, 2783, 4038, 3545, 2916, 3112, 2834, 3880, 3673, 4102, 4399, 4048, 3752, 4207, 1235, 3943, 4355, 4087, 4100, 4327, 4037, 4163, 3918, 4486, 1243, 3933, 4178, 1662, 1643, 4152, 3634, 3617, 4445, 4303, 1370, 3838, 4199, 4284, 1213, 4382, 1399, 1187, 3714, 1828, 4487, 3615, 1842, 1501, 3746, 4018, 4420, 3606, 4121, 3724, 3935, 1941, 4419, 4282, 1955, 1949, 4310, 4488, 1577, 4127, 1288, 1171, 3670, 4052, 3627, 3777, 936, 1371, 3685, 1325, 1940, 380, 4482, 4258, 3812, 1581, 1860, 4124, 4508, 4500, 3652, 3972, 1309, 1630, 1528, 3717, 1217, 3692, 4430, 3764, 4316, 4285, 3645, 3971, 4421, 1172, 4026, 2740, 3125, 3546, 1725, 1206, 3842, 4404, 3690, 3962, 4513, 4340, 4329, 4410, 3703, 4136, 1763, 1487, 3589, 3907, 4153, 2707, 3730, 4426, 4180, 4041, 3923, 4444, 3851, 4429, 4361, 1441, 4394, 4302, 3758, 4510, 3742, 1868, 4077, 1710, 1939, 1335, 1666, 1407, 4187, 1193, 1188, 1196, 1724, 1717, 1200, 1646, 1997, 1975, 1701, 4280, 1613, 4006, 1984, 1351, 3653, 3833, 1593, 2561, 4442, 3900, 4298, 1761, 4388, 1820, 1597, 4317, 4249, 1341, 1203, 1680, 4441, 3628, 3725, 1945, 937, 4206, 1588, 1439, 3794, 4447, 1838, 3776, 3658, 4064, 1377, 4011, 4272, 4503, 1324, 1367, 3594, 3680, 1300, 1750, 3913, 3774, 1877, 1987, 1862, 3998, 1380, 4185, 3686, 3696, 4463, 1350, 4008, 4230, 3853, 4244, 4083, 381, 1909, 3897, 1546, 382, 3613, 3273, 3452, 3525, 1229, 4105, 3835, 383, 1263, 1234, 3970, 1492, 3856, 3586, 1175, 4321, 4020, 4144, 1224, 1199, 3667, 2778, 4412, 4407, 1812, 1810, 3823, 1416, 1427, 1507, 1878, 4333, 3146, 4281, 4211, 1179, 3843, 1669, 1677, 1524, 1525, 1974, 384, 1979, 1456, 1239, 4167, 3740, 1876, 1388, 1967, 1474, 385, 1342, 1471, 4176, 1232, 1989, 4125, 1741, 1508, 1580, 4060, 4378, 1576, 1212, 1893, 3921, 3585, 1174, 1396, 4061, 4015, 1207, 3698, 3825, 3922, 4021, 4181, 1598, 1916, 1429, 4502, 4231, 1321, 4390, 3693, 3734, 1382, 3684, 1747, 3806, 3896, 3635, 1768, 4025, 3976, 3840, 3963, 4286, 1502, 3836, 4161, 3659, 3743, 4130, 3605, 1385, 1783, 4392, 4328, 1316, 4173, 4265, 1246, 1985, 1629, 1829, 1737, 3826, 1473, 1992, 1883, 1656, 1837, 1914, 1839, 1834, 3984, 4495, 3910, 4160, 3671, 4184, 4132, 4250, 1503, 1237, 1523, 1417, 4063, 1562, 3977, 1971, 1707, 1847, 1792, 3769, 4074, 1534, 4239, 4003, 3915, 1689, 1776, 1599, 1265, 1410, 1823, 1498, 1329, 939, 386, 940, 387, 1655, 3874, 4261, 3626, 1791, 3579, 1644, 3936, 4054, 4260, 4359, 4131, 4297, 4357, 4022, 3770, 4046, 1222, 1996, 3788, 4169, 1925, 3953, 4228, 4226, 4277, 4101, 1889, 1369, 3797, 4088, 4019, 3771, 3632, 1402, 388, 1520, 1767, 1466, 1194, 4137, 1908, 1927, 1758, 3772, 3661, 4186, 4174, 1170, 3850, 1315, 1611, 1530, 1859, 2209, 4183, 1408, 1403, 941, 4033, 3623, 3596, 1461, 1848, 1173, 1928, 1459, 1765, 1826, 3719, 1931, 3584, 4004, 3591, 3967, 4168, 3957, 3878, 4165, 4191, 3980, 4058, 4200, 4336, 3958, 1260, 4051, 3798, 4032, 1774, 4322, 3991, 4106, 1641, 1570, 3978, 3965, 4464, 3813, 4154, 1365, 4257, 3846, 4345, 4379, 3603, 1693, 3937, 3801, 1787, 1214, 4483, 4201, 1898, 1845, 1226, 1220, 4245, 1347, 3867, 1900, 3640, 3916, 4089, 1209, 3745, 3988, 3975, 4236, 4075, 4146, 4256, 4308, 4000, 4148, 3588, 3868, 4403, 3883, 4326, 4393, 3895, 4237, 3955, 3727, 4005, 4092, 4372, 4283, 1553, 3805, 4151, 1281, 1681, 4489, 3982, 4437, 3597, 4342, 3872, 3987, 4490, 3876, 3668, 4300, 1679, 1242, 3598, 3583, 3647, 389, 4304, 3793, 3779, 1937, 1907, 4042, 3648, 3996, 3800, 4367, 4099, 1807, 3887, 4428, 1625, 1390, 1884, 1682, 4364, 4306, 3869, 1278, 1672, 942, 1505, 1542, 1709, 1915, 3600, 3914, 1968, 3948, 1670, 3811, 1865, 1362, 943, 1716, 3961, 1506, 4221, 1376, 944, 1683, 4276, 1445, 1721, 1632, 3607, 1328, 1455, 1913, 1497, 1317, 1951, 1778, 1379, 3768, 4225, 1668, 2383, 945, 390, 391, 4406, 4341, 1480, 392, 393, 394, 395, 1714, 1422, 396, 2043, 946, 2265, 397, 3618, 4433, 1177, 3898, 398, 2251, 947, 948, 2212, 949, 950, 399, 951, 400, 1965, 4640, 2129, 2345, 4471, 952, 953, 402, 2475, 403, 404, 4758, 955, 2437, 4139, 1482, 3602, 4434, 3721, 1592, 1825, 1698, 1519, 1352, 4202, 4409, 1977, 1917, 405, 406, 407, 408, 956, 2272, 957, 2267, 1631, 1684, 409, 2054, 3889, 958, 410, 2117, 411, 959, 412, 960, 2443, 4712, 4619, 2285, 414, 415, 961, 2352, 2417, 962, 1905, 416, 963, 417, 418, 3675, 1833, 3974, 419, 964, 420, 421, 965, 966, 967, 968, 2365, 969, 970, 422, 1897, 2056, 2309, 4733, 1272, 4754, 2207, 971, 423, 4133, 3830, 4865, 972, 424, 973, 425, 2068, 4955, 426, 974, 427, 1708, 4676, 428, 4141, 430, 3749, 431, 1619, 975, 4044, 3590, 1944, 4126, 1923, 1706, 432, 976, 977, 978, 4867, 4400, 433, 434, 1606, 2143, 979, 435, 980, 2604, 2895, 981, 436, 3448, 4959, 4563, 2188, 437, 438, 1692, 982, 2388, 2433, 2243, 983, 2035, 2120, 4940, 439, 440, 441, 2474, 442, 2052, 4764, 3862, 4055, 4358, 984, 2435, 4589, 2276, 2401, 985, 1664, 443, 2073, 2405, 986, 4309, 4045, 3854, 3682, 2491, 444, 445, 1972, 2688, 4366, 3425, 3231, 3649, 2759, 2724, 3873, 3755, 1216, 3599, 3775, 2754, 2606, 3471, 3234, 2565, 2803, 2562, 2684, 3411, 3405, 2690, 1255, 3694, 446, 3985, 3535, 1306, 4084, 3282, 447, 1353, 2168, 1780, 987, 988, 989, 2126, 448, 449, 2107, 450, 2031, 990, 451, 452, 991, 1485, 2242, 453, 2286, 992, 1728, 993, 4703, 994, 995, 454, 1696, 996, 2039, 455, 997, 998, 3116, 1869, 456, 4759, 2500, 4798, 2262, 4562, 457, 1386, 999, 458, 4768, 4982, 4778, 2040, 1000, 4981, 3879, 2698, 459, 460, 1001, 461, 1447, 462, 1002, 2042, 2339, 1003, 463, 464, 4425, 1645, 465, 1004, 467, 468, 469, 1231, 1468, 470, 471, 2496, 472, 473, 1005, 474, 475, 2108, 4725, 1006, 476, 1273, 1007, 1744, 1488, 1659, 477, 478, 4598, 1604, 4753, 2493, 479, 1008, 1009, 480, 1010, 1011, 1012, 1013, 1014, 481, 4313, 482, 483, 1499, 484, 1015, 4761, 2091, 2513, 1016, 4073, 1777, 2172, 485, 2205, 4592, 4545, 4720, 486, 1458, 4274, 2122, 4905, 5003, 4599, 4796, 2152, 4539, 4528, 4904, 4842, 4986, 4639, 4846, 4623, 4650, 4595, 2195, 4681, 2142, 487, 2182, 4710, 1775, 2083, 4205, 1526, 4586, 4602, 4518, 1697, 1017, 2000, 4692, 4795, 2480, 488, 2335, 489, 4969, 1894, 1882, 1817, 1880, 490, 1018, 3917, 3616, 4311, 1800, 4473, 4085, 4401, 1310, 3783, 3765, 1538, 3870, 491, 1948, 3699, 1735, 3792, 4290, 2074, 492, 2202, 5001, 2136, 493, 2211, 4532, 494, 2421, 495, 4090, 2378, 2104, 2210, 2247, 2478, 2047, 496, 4620, 4978, 4614, 1019, 2012, 1803, 3642, 497, 1322, 1020, 498, 1021, 2235, 2302, 2488, 4665, 4540, 5006, 499, 2049, 2404, 4685, 500, 501, 1022, 502, 1333, 503, 1023, 4686, 4804, 504, 4727, 505, 506, 4938, 4805, 2065, 1890, 4891, 1024, 507, 508, 509, 1025, 510, 1026, 3608, 1732, 511, 2397, 1864, 1816, 1531, 512, 513, 2451, 3636, 5012, 4892, 514, 1699, 4593, 1027, 4987, 515, 2495, 4660, 1028, 516, 1029, 2409, 1366, 2112, 2178, 2124, 2376, 5011, 4572, 4957, 4789, 4543, 4664, 4678, 2093, 4746, 2489, 4922, 2145, 1030, 4832, 4950, 1261, 4027, 3478, 3763, 2959, 1293, 2462, 517, 3197, 1595, 3413, 2238, 1031, 2228, 1448, 518, 2057, 2305, 2133, 2061, 4526, 4617, 1033, 2429, 2311, 1675, 4785, 1797, 519, 4578, 2271, 2466, 2148, 2420, 520, 4854, 2381, 2315, 2284, 4813, 521, 1034, 522, 523, 1999, 3759, 1215, 4122, 1730, 524, 525, 526, 3966, 4573, 5008, 1035, 527, 4973, 2508, 528, 3911, 529, 3289, 1821, 530, 531, 2426, 1036, 532, 1874, 533, 534, 1037, 535, 1038, 536, 1039, 537, 538, 539, 1040, 3767, 1929, 1041, 1042, 3683, 2100, 4853, 2300, 2165, 540, 541, 1043, 4906, 542, 1338, 2292, 2021, 1616, 1901, 1796, 1517, 4331, 4332, 4466, 2719, 3803, 4123, 4233, 1824, 3129, 3087, 3505, 4158, 4254, 1449, 2121, 1044, 3720, 4351, 4414, 1673, 3453, 3254, 2501, 1649, 543, 544, 545, 546, 1045, 547, 2084, 4240, 3580, 4680, 1046, 548, 2062, 1047, 550, 2598, 551, 552, 553, 3819, 1259, 4062, 1048, 554, 2841, 1049, 1050, 3515, 2219, 1433, 1323, 4301, 555, 556, 1051, 557, 558, 1052, 1053, 3738, 1567, 559, 1054, 1270, 3857, 1055, 2151, 560, 2175, 2089, 1056, 2198, 2193, 1257, 1238, 3662, 561, 2186, 1057, 4637, 562, 1058, 563, 4872, 2097, 564, 1059, 565, 566, 1060, 1061, 2231, 4203, 1899, 3981, 1062, 1303, 4116, 567, 1063, 568, 569, 570, 2367, 1946, 3620, 1064, 1514, 4002, 3679, 3964, 3707, 3666, 1348, 4273, 1804, 4497, 571, 1401, 4438, 1895, 1264, 572, 1912, 573, 3939, 4170, 4056, 1271, 1065, 1521, 1221, 1066, 1451, 1654, 1067, 3934, 4080, 4352, 574, 1700, 3739, 1565, 1419, 1811, 3950, 1690, 1397, 3716, 1569, 1465, 1437, 1674, 4337, 1285, 4268, 1183, 3726, 3881, 4134, 4347, 4012, 3938, 4066, 4198, 4416, 4164, 3630, 4229, 4292, 4193, 4325, 4375, 4371, 4432, 4215, 1753, 3944, 1409, 4195, 1729, 4223, 1540, 4455, 1068, 1069, 4512, 1723, 1070, 3750, 3633, 4070, 4104, 4162, 4235, 1863, 4346, 1881, 1814, 1572, 2418, 575, 4443, 3761, 1346, 1587, 1072, 3592, 576, 1891, 4469, 2430, 1275, 577, 1950, 1963, 4129, 1073, 1296, 1360, 1551, 3733, 4111, 3993, 4108, 3949, 1287, 1713, 1556, 1736, 1995, 1435, 1424, 1830, 1705, 1861, 1197, 1254, 4120, 1545, 4417, 1469, 1292, 2279, 1785, 1236, 4293, 1827, 3839, 3983, 4395, 1957, 2222, 578, 3928, 4295, 3715, 3855, 3609, 1990, 4076, 4175, 3927, 1757, 1650, 4299, 1773, 2004, 1267, 1364, 579, 1462, 1879, 4007, 3729, 3665, 3722, 1691, 1712, 1074, 1624, 1751, 1394, 3924, 3952, 580, 581, 2003, 1343, 2203, 1559, 1250, 1555, 2304, 582, 2395, 4114, 1818, 1075, 583, 1076, 1077, 1704, 4448, 584, 4882, 1078, 1079, 1786, 585, 3354, 1832, 586, 3432, 2891, 587, 588, 4583, 2505, 1903, 2077, 4936, 4658, 4830, 2446, 1080, 2278, 1081, 1082, 4459, 1083, 589, 1563, 1084, 2255, 2113, 590, 591, 1085, 2256, 592, 2308, 593, 594, 2274, 595, 4931, 2407, 1858, 596, 597, 598, 1453, 2559, 2590, 2738, 4478, 4069, 1809, 1327, 4150, 3260, 3481, 3672, 3625, 2008, 4439, 3852, 3997, 1411, 599, 3847, 4993, 1268, 4050, 3377, 4424, 1496, 4143, 4493, 3492, 1962, 1412, 2455, 600, 2457, 2321, 1086, 601, 4017, 4477, 1794, 2483, 4776, 2291, 602, 4263, 3072, 2009, 2199, 1754, 1087, 1088, 3888, 603, 604, 4777, 2324, 605, 1368, 3827, 4103, 606, 607, 1089, 2220, 4549, 1090, 1571, 1091, 1438, 608, 1092, 609, 610, 611, 1093, 612, 1094, 3701, 4389, 613, 4897, 1603, 614, 1095, 2154, 5000, 615, 616, 2263, 1332, 1715, 4369, 1652, 1096, 617, 1541, 618, 1921, 1733, 1373, 1870, 619, 4218, 1798, 2387, 1097, 1098, 1099, 1100, 620, 1702, 621, 622, 4801, 2398, 2239, 1101, 1667, 1384, 623, 4745, 3700, 1788, 1600, 624, 2098, 625, 4550, 4721, 4960, 4878, 2473, 4792, 4675, 1102, 1423, 626, 2771, 627, 1339, 3875, 628, 629, 3070, 4565, 2118, 4818, 4860, 2557, 2795, 2906, 2103, 4869, 2029, 3299, 3118, 4932, 4838, 4901, 2377, 4657, 4646, 4875, 4627, 4515, 4876, 4965, 4605, 4576, 2028, 4985, 4799, 4850, 1103, 4747, 1614, 1947, 2237, 630, 631, 4618, 4479, 3766, 632, 1104, 1105, 4886, 1106, 2432, 4827, 633, 1107, 4530, 634, 2371, 4651, 1108, 4536, 635, 1813, 636, 2431, 4866, 4991, 4814, 4560, 4956, 637, 4555, 1109, 4941, 4577, 2213, 638, 639, 3706, 1110, 640, 1111, 641, 4581, 4893, 4831, 2481, 4644, 4734, 2190, 4524, 4881, 4837, 4888, 4648, 642, 4548, 4807, 4896, 4868, 2374, 1112, 4823, 2164, 1113, 3735, 3390, 1694, 3431, 2838, 3483, 3464, 3848, 2558, 3314, 3086, 3029, 2956, 3517, 2651, 2914, 2680, 2632, 3121, 3100, 3528, 3526, 3084, 4220, 3304, 2846, 1186, 3235, 2903, 3559, 2687, 3409, 3237, 2900, 2999, 3349, 3171, 2752, 3262, 3504, 3047, 4376, 3193, 3430, 2525, 2670, 2911, 3508, 2776, 2697, 3200, 2790, 3323, 2543, 2874, 2614, 3904, 3373, 3054, 2617, 4242, 3621, 2708, 4179, 4398, 3959, 4935, 1269, 3095, 1286, 3624, 4481, 1432, 3511, 2735, 4381, 3295, 1585, 2390, 1568, 1114, 1766, 3221, 2643, 2739, 643, 4735, 4760, 1115, 4918, 4688, 3920, 644, 4723, 4949, 4748, 4607, 4719, 1116, 645, 646, 4611, 2353, 4645, 4998, 2307, 647, 1801, 4279, 3762, 1637, 1509, 4843, 4797, 4590, 4516, 4995, 4541, 2200, 4580, 4858, 648, 649, 2502, 1117, 4780, 4800, 4551, 4674, 1118, 1119, 2965, 2369, 2695, 3293, 650, 651, 4730, 4862, 4722, 4944, 1120, 652, 1121, 4983, 4784, 4877, 4643, 653, 654, 4909, 1122, 3264, 655, 2076, 4849, 656, 657, 2447, 658, 659, 2191, 4035, 2910, 3391, 2808, 3099, 2913, 3676, 2852, 3284, 2731, 1609, 2375, 2201, 3537, 3994, 1319, 4467, 1802, 1227, 1623, 660, 4844, 2086, 4770, 2192, 1123, 661, 2364, 662, 663, 664, 1124, 1125, 665, 2487, 4899, 2138, 1126, 666, 667, 4569, 4554, 4917, 2322, 1127, 1128, 1129, 668, 669, 1130, 670, 1131, 1527, 1132, 671, 1772, 2314, 1133, 1134, 2470, 1135, 672, 2236, 4716, 673, 4600, 2196, 674, 2456, 4606, 4910, 2123, 1136, 1137, 2358, 5005, 2208, 4952, 4945, 1933, 1731, 1793, 675, 676, 3342, 1138, 1139, 677, 4840, 4597, 4870, 1140, 4990, 4954, 4916, 678, 1141, 4737, 4527, 2253, 4531, 679, 1142, 1143, 680, 4771, 1144, 4638, 681, 4705, 4525, 4522, 4898, 2325, 2415, 5004, 1145, 682, 683, 1146, 684, 685, 2445, 686, 687, 4861, 2157, 688, 3822, 689, 690, 4743, 691, 1147, 1601, 692, 1148, 693, 4537, 4825, 4625, 4621, 3905, 694, 695, 1414, 1149, 696, 2027, 2159, 4756, 4793, 4575, 2160, 4828, 4731, 4718, 4802, 4750, 1150, 2081, 2258, 697, 1795, 1372, 1695, 1866, 1151, 4115, 1719, 2280, 4662, 698, 2176, 2194, 2217, 1920, 699, 700, 701, 4999, 1544, 4739, 2512, 702, 703, 4031, 4305, 1636, 1393, 2010, 3810, 4452, 3677, 4227, 1277, 1400, 4402, 4157, 4197, 1337, 1253, 1532, 4028, 3989, 2449, 4715, 704, 2050, 1493, 1854, 1902, 1510, 1152, 4824, 705, 2340, 4182, 706, 4652, 2442, 2484, 707, 708, 709, 4667, 1153, 2412, 4476, 2053, 710, 1375, 711, 712, 713, 4829, 4738, 4811, 4570, 4961, 1245, 714, 2045, 4707, 715, 2169, 4713, 4879, 1841, 4234, 4924, 1154, 1314, 4096, 2023, 716, 717, 4895, 2414, 718, 1155, 719, 720, 2063, 1311, 4921, 721, 4642, 722, 4885, 4666, 2249, 4217, 1156, 723, 1157, 1627, 2116, 4566, 2287, 1158, 2330, 4826, 4622, 4740, 724, 4700, 725, 1159, 5013, 4894, 726, 2434, 1953, 1160, 1201, 727, 3787, 2046, 1161, 728, 729, 2485, 2044, 4568, 3747, 730, 731, 2024, 1846, 2507, 2368, 2019, 2333, 3815, 2005, 2266, 1964, 2347, 2385, 732, 2177, 2059, 4958, 1822, 4815, 1262, 2094, 4480, 1537, 1291, 2419, 1318, 2283, 4976, 4294, 2486, 4926, 1582, 2162, 733, 4587, 734, 735, 3439, 2833, 4287, 4509, 4505, 4267, 3697, 3272, 4112, 2967, 3651, 1991, 1805, 1628, 3705, 2479, 736, 1195, 4863, 1163, 3859, 1164, 2394, 1165, 2355, 2351, 4679, 4835, 2259, 4839, 4571, 2275, 1166, 4968, 2250, 4912, 2423, 737, 1167, 4989, 4684, 4669, 4552, 4612, 2127, 1745, 1973, 4767, 1168, 2273, 2310, 3807, 4307, 1169, 2303, 1454, or 1781. In some aspects, the 581 to 589 region of the VP capsid polypeptide has a sequence of any one of SEQ ID NOs: 2498, 4884, 738, 739, 4177, 1289, 740, 14, 15, 741, 742, 743, 16, 744, 17, 18, 745, 3477, 1548, 3051, 2982, 2171, 2877, 746, 19, 20, 3036, 3426, 3073, 3169, 747, 2406, 3362, 2784, 2469, 4889, 21, 3192, 4942, 22, 23, 1638, 748, 24, 25, 749, 26, 27, 1703, 1836, 28, 2038, 2301, 3660, 29, 750, 30, 31, 32, 2095, 1640, 33, 35, 36, 37, 4742, 2450, 38, 4925, 39, 751, 752, 2144, 1653, 1205, 3795, 753, 4288, 4219, 2770, 2962, 4241, 4107, 2718, 3317, 4391, 4053, 3263, 2553, 3947, 2710, 2608, 3467, 2796, 2961, 2529, 3320, 2674, 2635, 3446, 3053, 3250, 3688, 1182, 1998, 4320, 3351, 2655, 3514, 2779, 3194, 3319, 3224, 3281, 3708, 2807, 3562, 3274, 3374, 3013, 3416, 2981, 3065, 2777, 3469, 2977, 2638, 2972, 3059, 2574, 3380, 4262, 3167, 3368, 2781, 3547, 3386, 1225, 2960, 3485, 3370, 3443, 2824, 754, 1467, 3327, 3178, 3006, 3252, 2991, 3470, 2888, 2572, 3418, 2642, 2519, 3363, 40, 2633, 41, 42, 43, 755, 2511, 44, 45, 756, 46, 757, 47, 48, 1952, 758, 2341, 2410, 49, 3122, 2551, 3718, 4806, 2216, 3484, 3577, 759, 2080, 50, 1308, 1230, 3960, 1378, 2994, 3080, 2589, 3681, 51, 4694, 2257, 2167, 52, 760, 53, 2389, 4934, 4951, 4755, 761, 762, 4659, 54, 2146, 3925, 55, 3654, 2087, 2346, 4766, 4682, 4984, 4744, 56, 763, 764, 4626, 4702, 58, 59, 60, 61, 4086, 1740, 1660, 765, 766, 62, 1966, 2032, 2499, 2332, 767, 63, 2096, 2181, 4913, 2438, 2041, 64, 768, 769, 770, 2384, 2402, 771, 65, 66, 2111, 67, 772, 2458, 2197, 68, 3816, 69, 2599, 2706, 2497, 70, 2234, 2183, 2399, 71, 4769, 2366, 72, 73, 74, 3865, 1549, 1361, 2453, 3882, 773, 3713, 1942, 75, 1312, 4501, 76, 77, 774, 1413, 775, 776, 78, 1560, 4289, 3757, 79, 3593, 4043, 1806, 3908, 4397, 1615, 4415, 3723, 2006, 3754, 1470, 4360, 80, 3945, 2854, 3523, 3669, 1356, 777, 2132, 2379, 82, 4065, 83, 84, 2030, 1294, 2413, 2064, 1484, 2299, 85, 4594, 86, 778, 87, 3891, 4456, 4040, 4496, 1982, 2001, 1478, 1189, 88, 1490, 1885, 1926, 89, 90, 91, 779, 2270, 780, 2161, 1180, 92, 781, 782, 783, 93, 2356, 784, 785, 786, 94, 95, 787, 788, 1831, 1867, 96, 4458, 97, 1970, 4656, 2173, 1936, 2349, 1590, 4585, 98, 99, 100, 789, 790, 1298, 101, 1688, 791, 792, 2007, 2070, 102, 793, 4632, 103, 794, 795, 104, 105, 106, 2229, 796, 4980, 4691, 107, 2440, 1849, 108, 2014, 797, 4736, 2509, 2018, 2227, 4787, 109, 1579, 110, 1906, 111, 2428, 798, 112, 2411, 113, 2359, 799, 4848, 800, 2461, 1444, 2313, 2350, 4579, 4821, 801, 114, 2329, 4864, 4834, 115, 1344, 116, 802, 117, 118, 119, 4929, 4677, 120, 4791, 2158, 121, 803, 804, 1463, 805, 122, 2139, 2290, 1760, 2465, 2424, 2058, 2230, 124, 4717, 806, 125, 126, 2370, 127, 4521, 128, 4971, 4994, 807, 2085, 129, 130, 131, 132, 4933, 808, 2336, 2026, 2204, 809, 810, 2281, 133, 1978, 134, 811, 812, 135, 136, 137, 138, 813, 814, 139, 4673, 140, 815, 1326, 141, 142, 143, 2344, 4544, 144, 145, 816, 4654, 2125, 4663, 4810, 4816, 1634, 1302, 817, 146, 818, 147, 148, 149, 4546, 150, 151, 152, 153, 154, 155, 819, 820, 156, 2149, 157, 2295, 821, 158, 159, 160, 161, 4631, 2441, 162, 163, 164, 165, 166, 822, 167, 168, 169, 170, 171, 823, 172, 4613, 824, 1651, 173, 1483, 174, 175, 825, 176, 177, 178, 179, 4624, 2170, 4809, 4520, 180, 826, 827, 181, 828, 4695, 2130, 4911, 182, 4582, 4873, 4596, 2020, 2189, 183, 4641, 829, 184, 185, 2244, 4647, 186, 187, 188, 189, 190, 2114, 830, 191, 192, 193, 194, 2071, 4615, 2361, 195, 4852, 2187, 4914, 4947, 196, 1391, 197, 4534, 4726, 4788, 198, 199, 4920, 831, 2240, 2223, 200, 201, 202, 203, 2106, 2503, 4775, 204, 205, 832, 833, 206, 834, 2232, 2294, 207, 2166, 208, 209, 210, 835, 836, 1334, 837, 3901, 3312, 2649, 1301, 211, 212, 1450, 4386, 3028, 213, 1446, 214, 2206, 215, 1896, 1522, 3490, 838, 216, 2090, 2241, 217, 218, 4653, 219, 1612, 220, 221, 222, 839, 223, 4953, 4974, 4790, 4915, 2464, 4567, 4774, 4964, 2360, 840, 224, 4928, 4741, 225, 2088, 4751, 5007, 4542, 226, 227, 4890, 4519, 4883, 228, 4786, 229, 230, 231, 2393, 2448, 841, 842, 232, 233, 4782, 234, 4962, 2269, 843, 235, 844, 236, 237, 4930, 845, 846, 238, 847, 4704, 239, 848, 849, 2150, 850, 851, 852, 853, 1536, 240, 854, 241, 242, 243, 244, 245, 246, 247, 248, 4923, 2245, 4696, 855, 4634, 856, 249, 250, 251, 252, 253, 254, 255, 857, 2115, 4880, 256, 257, 258, 259, 858, 859, 260, 261, 860, 861, 862, 262, 4966, 863, 864, 263, 4749, 4970, 2296, 2318, 4535, 865, 2326, 264, 1241, 265, 266, 866, 1477, 267, 867, 4977, 268, 868, 269, 4668, 5002, 270, 869, 870, 271, 871, 872, 272, 4822, 4709, 873, 4655, 4972, 2392, 2317, 874, 1252, 273, 1591, 4975, 875, 274, 2025, 275, 1980, 276, 876, 877, 2066, 277, 278, 279, 4670, 280, 2323, 2288, 2334, 4689, 281, 878, 2416, 1892, 879, 1539, 2214, 2215, 880, 2327, 881, 882, 4601, 883, 1295, 3601, 3877, 1930, 1420, 1678, 1460, 2306, 884, 282, 1799, 283, 284, 4988, 4871, 4553, 4772, 4817, 2260, 285, 1626, 2082, 885, 286, 1374, 886, 2119, 2504, 2468, 287, 1620, 1290, 2425, 2482, 4671, 2282, 288, 2354, 1354, 2033, 289, 887, 290, 888, 291, 1956, 2467, 889, 2357, 4547, 4765, 292, 4794, 2391, 4324, 890, 294, 295, 4138, 891, 2297, 296, 2224, 3903, 297, 892, 3829, 298, 299, 3809, 4271, 3844, 1436, 300, 1515, 1617, 4701, 2174, 301, 1961, 4649, 5010, 302, 2060, 303, 304, 305, 2452, 2147, 4574, 4538, 306, 2293, 1589, 893, 4946, 4370, 4841, 2342, 307, 308, 309, 894, 2246, 2155, 3646, 4059, 1431, 1331, 310, 311, 4836, 4948, 312, 895, 1779, 313, 314, 315, 316, 896, 1558, 1552, 317, 2312, 318, 319, 897, 320, 898, 321, 322, 899, 1958, 2022, 2016, 900, 2454, 323, 2427, 2134, 324, 901, 325, 902, 326, 2373, 4803, 2459, 1491, 327, 328, 903, 2463, 2264, 329, 330, 904, 1635, 4820, 905, 2506, 331, 4706, 2092, 4484, 1756, 906, 907, 4661, 2179, 4584, 332, 4907, 4635, 4529, 4683, 4523, 4561, 333, 2337, 3536, 2701, 2799, 3332, 3294, 3159, 3069, 2637, 3025, 2782, 3247, 3350, 2692, 2586, 3004, 3049, 2694, 2650, 3554, 2983, 3403, 3214, 3163, 2541, 3090, 3097, 3462, 1430, 2941, 3486, 2842, 3558, 3104, 3037, 3419, 2780, 2931, 1276, 2928, 2609, 3068, 3128, 2548, 2538, 2618, 2789, 3228, 2657, 3189, 2128, 2863, 3307, 3300, 2546, 3048, 3543, 2946, 2975, 3346, 3067, 2728, 2955, 3408, 3027, 3094, 3203, 2988, 2751, 2953, 2566, 2578, 2823, 3063, 3335, 3000, 3181, 3011, 3138, 3389, 2805, 3074, 2894, 3149, 2560, 3417, 3265, 3378, 2901, 2837, 2822, 2745, 3473, 3530, 3040, 2597, 3509, 3522, 3161, 2926, 3209, 3105, 3400, 2630, 2905, 2671, 2818, 2806, 2702, 2709, 2400, 3549, 3538, 2534, 2773, 2623, 3491, 3243, 3136, 2693, 3164, 3343, 2918, 2555, 2794, 2679, 3510, 3110, 2672, 3442, 2929, 3184, 3488, 2135, 4763, 3414, 3093, 2996, 3141, 3544, 3102, 2856, 2957, 3466, 3461, 2788, 2660, 3344, 3204, 2720, 3379, 2826, 1789, 2396, 2785, 3249, 3527, 4460, 3352, 2051, 2569, 4457, 2011, 4857, 2163, 4783, 4319, 3906, 1533, 1755, 1888, 4248, 1557, 2153, 3804, 1363, 1934, 1602, 1404, 4188, 1330, 4349, 3337, 3533, 2629, 3038, 2539, 3567, 3291, 3348, 3115, 3359, 2993, 3079, 3506, 2527, 2963, 2938, 2516, 3113, 1345, 2639, 3143, 3044, 2747, 3154, 3280, 3039, 2743, 2902, 3056, 2554, 2522, 3103, 3210, 3434, 2656, 4251, 4166, 4196, 3206, 3328, 2588, 3553, 2714, 3078, 3222, 3137, 3357, 2717, 2944, 3012, 3220, 3202, 2811, 3083, 3269, 3566, 2699, 2515, 3023, 2533, 3288, 3075, 3005, 2685, 3058, 2976, 2622, 3333, 3463, 2939, 3521, 3268, 3117, 2626, 2616, 3240, 2570, 3565, 2919, 3157, 2849, 3444, 2631, 3420, 2659, 3325, 3186, 2920, 3258, 3440, 3457, 3310, 2761, 3134, 2621, 3531, 2711, 2774, 2867, 2585, 3155, 2620, 3156, 2844, 3126, 3160, 2909, 3542, 3225, 2887, 3474, 3218, 2744, 2896, 3135, 3424, 3498, 3529, 2661, 2667, 2549, 2819, 2768, 2935, 3182, 2772, 3230, 3043, 2922, 3581, 3524, 2869, 2610, 3298, 2775, 3108, 2603, 3614, 2612, 2860, 3187, 3238, 3786, 4385, 3016, 3436, 2876, 2987, 3532, 3438, 3561, 3259, 2663, 2890, 3433, 3071, 3018, 2580, 2755, 3015, 2540, 3398, 2664, 2583, 2830, 2644, 2641, 3513, 2725, 2723, 3338, 3556, 2866, 2514, 2932, 2753, 2862, 2899, 2605, 2989, 3096, 3124, 2985, 2716, 3145, 3017, 2591, 2640, 3033, 1853, 3216, 3316, 3412, 2971, 3256, 3153, 3575, 3339, 2915, 2531, 3552, 3475, 3060, 3375, 2756, 3382, 2847, 2859, 3251, 3702, 3423, 2537, 2801, 3076, 2696, 3092, 3459, 3144, 3441, 2802, 3479, 2907, 3512, 3518, 3021, 2871, 3032, 2647, 2945, 3045, 2763, 3313, 3034, 3315, 3541, 2746, 2669, 2524, 3003, 2732, 3166, 3046, 3306, 2873, 3364, 3253, 3215, 3061, 2804, 2722, 2964, 2990, 2836, 4098, 4449, 3173, 2762, 3737, 2628, 3507, 2564, 3031, 2872, 3360, 2658, 2930, 2904, 3244, 3217, 3311, 3445, 2840, 3372, 2958, 3098, 3356, 3456, 3388, 2624, 3207, 2576, 2742, 2665, 2815, 3052, 3421, 2593, 3242, 2535, 2966, 2898, 2858, 2943, 2668, 2798, 3196, 2528, 2713, 3001, 2691, 2948, 2767, 2544, 3302, 2734, 2893, 2592, 2861, 3502, 2969, 2582, 3229, 2676, 2545, 3255, 3330, 2547, 3257, 2882, 3151, 3088, 2883, 3318, 2645, 2733, 2587, 3500, 3008, 2715, 2845, 3183, 2654, 3233, 3267, 2741, 2827, 2704, 3091, 2832, 2736, 3177, 3271, 2835, 2908, 3176, 2947, 3292, 3191, 2517, 3026, 3082, 3392, 3381, 2584, 2712, 3213, 3451, 2634, 3150, 2810, 3303, 2573, 3460, 2615, 3394, 2828, 3329, 4377, 4499, 3555, 2974, 3782, 3629, 3578, 3885, 2817, 3248, 2954, 3334, 3571, 3345, 3551, 3384, 3422, 1357, 1844, 2530, 2973, 4418, 4081, 3951, 1764, 1671, 1852, 334, 1843, 3449, 3185, 3399, 2786, 3055, 3472, 3397, 2601, 3564, 3277, 4373, 3548, 3179, 3407, 3841, 3347, 3142, 4255, 4431, 3241, 3077, 2700, 3147, 2648, 3283, 2829, 3278, 2581, 2536, 4363, 2848, 3410, 2797, 2523, 2520, 2721, 3496, 2571, 3198, 3219, 3030, 2673, 2921, 3837, 3301, 3322, 2705, 3239, 2949, 3369, 3396, 2892, 2897, 2766, 3174, 3297, 2550, 2889, 2933, 2793, 2627, 2677, 3119, 2596, 3226, 3172, 3089, 2868, 2839, 3942, 3120, 3286, 2843, 3465, 1564, 3946, 4222, 1504, 3999, 2682, 1875, 2865, 3539, 3168, 2864, 3308, 3557, 2940, 3109, 3503, 2625, 3455, 3114, 2595, 3331, 2978, 2518, 2521, 4079, 3024, 3573, 2952, 2653, 1769, 3180, 2813, 2652, 2600, 2816, 3201, 3188, 3270, 2997, 2992, 3009, 3520, 2936, 3275, 3165, 3447, 3131, 3305, 2809, 2792, 2729, 2814, 2619, 3266, 2825, 3066, 2857, 2998, 3064, 2681, 3035, 3279, 2764, 3480, 3127, 2912, 3010, 2607, 3211, 3111, 3041, 1573, 3909, 4269, 3487, 3489, 3019, 335, 1266, 1415, 2980, 3428, 2444, 3435, 3482, 3020, 2748, 2646, 2787, 2760, 2563, 3085, 3133, 3158, 3170, 2703, 3494, 2556, 2552, 3395, 3245, 3404, 2675, 2791, 2252, 4845, 1911, 4856, 908, 1935, 4711, 4728, 2460, 4517, 2749, 3341, 3355, 2575, 2942, 2886, 2758, 2594, 3495, 2884, 3516, 3042, 2737, 2923, 3563, 2855, 3476, 2611, 2937, 3383, 3497, 3402, 3162, 2662, 2875, 3223, 2878, 2079, 1808, 3285, 2757, 3057, 2951, 3519, 2579, 2853, 3387, 3401, 3493, 3393, 1608, 3365, 2885, 3574, 3081, 3007, 3568, 3152, 3367, 3358, 336, 2268, 3468, 3290, 3550, 3132, 2726, 2879, 3190, 3309, 2613, 2765, 3106, 1355, 3454, 2851, 2881, 3232, 3458, 3326, 3353, 2927, 3212, 2950, 3376, 3208, 3062, 3612, 3195, 3385, 2686, 2602, 3569, 3123, 2727, 1622, 2821, 2636, 2750, 2850, 3050, 2925, 3336, 3540, 2689, 3139, 2526, 3361, 3022, 3427, 3107, 3140, 3371, 3276, 2831, 3501, 2924, 3366, 3199, 3101, 3321, 3499, 2917, 2683, 2800, 2812, 3340, 3227, 3148, 3657, 4446, 1746, 1464, 1886, 2666, 3246, 3130, 3560, 3236, 2730, 3572, 1607, 3689, 2968, 1457, 1500, 909, 337, 1184, 3450, 2577, 2567, 2532, 3415, 2934, 2984, 2568, 4147, 4943, 3002, 2986, 910, 2979, 2542, 2331, 2492, 1762, 4472, 1472, 1529, 2319, 2131, 4057, 2048, 4887, 1976, 4507, 1583, 338, 2078, 2372, 2102, 339, 911, 1711, 340, 912, 2013, 913, 2277, 914, 341, 915, 4672, 4902, 916, 342, 1594, 4440, 917, 343, 344, 4559, 918, 2233, 2439, 919, 345, 920, 346, 921, 922, 347, 2226, 348, 2180, 2298, 349, 350, 2099, 2036, 351, 4808, 923, 924, 4498, 1518, 3728, 3637, 3570, 3429, 4091, 2870, 2995, 4338, 3205, 2880, 3261, 1994, 3968, 4291, 4204, 4071, 4034, 1742, 2820, 3912, 3287, 1218, 1190, 4145, 353, 2422, 354, 355, 925, 1782, 2184, 2261, 2490, 926, 927, 928, 4630, 2137, 3610, 356, 357, 4729, 358, 359, 4224, 1918, 1959, 1840, 3736, 2471, 1770, 929, 930, 931, 4155, 360, 361, 362, 932, 363, 364, 1279, 2289, 365, 1543, 366, 2156, 2472, 367, 4049, 1633, 1722, 368, 369, 1495, 1566, 370, 4967, 372, 373, 1211, 1873, 2101, 2494, 1726, 374, 1442, 933, 1748, 4142, 1434, 1358, 1191, 3732, 4110, 4039, 4411, 4506, 4270, 4156, 3780, 4036, 4030, 4016, 1550, 3899, 1247, 1855, 1181, 3919, 1639, 3664, 1244, 4140, 3930, 4117, 4189, 4001, 3799, 3643, 3619, 1240, 1686, 1479, 1307, 1575, 4296, 1665, 3871, 4135, 1605, 4408, 3604, 1274, 4149, 1313, 3741, 1938, 3709, 1727, 3893, 1280, 3622, 1784, 3834, 1752, 1983, 1743, 3979, 4461, 4113, 3817, 4232, 1340, 1489, 4214, 3902, 1857, 2316, 1904, 1219, 1486, 1512, 1481, 1516, 3820, 3789, 4252, 4047, 4330, 4082, 4094, 1574, 1248, 4078, 1872, 1426, 3785, 3687, 4318, 4243, 3866, 3704, 4172, 1621, 4315, 1192, 1513, 1856, 3324, 2769, 2678, 1561, 3296, 375, 2343, 2348, 376, 377, 1395, 1584, 4093, 4453, 3940, 3778, 4374, 4210, 4009, 4264, 4339, 4368, 1738, 378, 1610, 4194, 4474, 4013, 4266, 1771, 1759, 1922, 3860, 3832, 1349, 1381, 3663, 1642, 1185, 4356, 3932, 1233, 4212, 3858, 1198, 4192, 3611, 1919, 1819, 3790, 3712, 1969, 4095, 1887, 4468, 1720, 4247, 934, 1790, 2002, 1657, 1663, 1336, 3894, 1554, 1494, 1405, 3576, 4314, 3695, 1851, 1850, 4362, 1815, 3845, 4511, 3656, 3638, 1406, 1596, 4454, 1443, 1661, 935, 4504, 1359, 1734, 3650, 1910, 1305, 1648, 3831, 4435, 1208, 1988, 4451, 1993, 1986, 3849, 1718, 4068, 1835, 1425, 1428, 1282, 4380, 1658, 1452, 1687, 4024, 379, 4072, 3791, 4491, 4323, 4014, 1304, 1440, 1511, 1981, 1676, 1547, 4422, 1283, 3861, 1383, 3644, 3691, 4259, 1749, 1418, 1176, 4216, 1924, 1421, 1387, 3992, 4423, 4253, 1618, 1871, 1256, 3748, 4119, 1297, 1586, 1251, 1299, 1954, 4450, 3990, 4029, 4097, 3890, 3796, 1389, 3711, 4344, 1578, 1476, 4343, 1202, 4413, 4384, 3808, 1647, 1475, 3892, 3674, 1739, 3926, 3595, 1943, 3756, 4405, 3973, 4109, 4159, 3744, 4387, 1960, 4275, 3781, 1535, 1210, 4492, 4365, 4118, 3655, 3886, 4278, 4383, 4485, 1392, 3751, 3931, 3986, 3678, 1249, 4353, 4208, 3710, 4238, 4213, 3969, 4436, 3175, 4128, 2970, 1228, 3534, 3437, 3406, 3641, 3639, 3954, 4335, 3995, 3582, 4475, 3784, 4470, 4010, 3802, 3941, 4427, 4396, 4348, 3587, 3818, 3864, 3956, 3863, 3731, 3814, 4067, 4354, 4350, 4334, 3821, 1932, 3929, 4171, 1258, 3824, 3631, 4465, 4494, 1320, 1398, 3828, 1204, 1223, 1284, 1685, 3773, 4209, 3014, 4462, 4246, 4190, 4312, 4023, 3760, 3753, 1178, 3884, 2783, 4038, 3545, 2916, 3112, 2834, 3880, 3673, 4102, 4399, 4048, 3752, 4207, 1235, 3943, 4355, 4087, 4100, 4327, 4037, 4163, 3918, 4486, 1243, 3933, 4178, 1662, 1643, 4152, 3634, 3617, 4445, 4303, 1370, 3838, 4199, 4284, 1213, 4382, 1399, 1187, 3714, 1828, 4487, 3615, 1842, 1501, 3746, 4018, 4420, 3606, 4121, 3724, 3935, 4419, 4282, 1955, 1949, 4310, 4488, 1577, 4127, 1288, 1171, 3670, 4052, 3627, 3777, 936, 1371, 3685, 1325, 1940, 380, 4482, 4258, 3812, 1581, 1860, 4124, 4508, 4500, 3652, 3972, 1309, 1630, 1528, 3717, 1217, 3692, 4430, 3764, 4316, 4285, 3645, 3971, 4421, 1172, 4026, 2740, 3125, 3546, 1725, 1206, 3842, 4404, 3690, 3962, 4513, 4340, 4329, 4410, 3703, 4136, 1763, 1487, 3589, 3907, 4153, 2707, 3730, 4426, 4180, 4041, 3923, 4444, 3851, 4429, 4361, 1441, 4394, 4302, 3758, 4510, 3742, 1868, 4077, 1710, 1939, 1335, 1666, 1407, 4187, 1193, 1188, 1196, 1724, 1717, 1200, 1646, 1997, 1975, 1701, 4280, 1613, 4006, 1984, 1351, 3653, 3833, 1593, 2561, 4442, 3900, 4298, 1761, 4388, 1820, 1597, 4317, 4249, 1341, 1203, 1680, 4441, 3628, 3725, 1945, 937, 4206, 1588, 1439, 3794, 4447, 1838, 3776, 3658, 4064, 1377, 4011, 4272, 4503, 1324, 1367, 3594, 3680, 1300, 1750, 938, 3913, 3774, 1877, 1987, 1862, 3998, 1380, 4185, 3686, 3696, 4463, 1350, 4008, 4230, 3853, 4244, 4083, 381, 1909, 3897, 1546, 382, 3613, 3273, 3452, 3525, 1229, 4105, 3835, 383, 1263, 1234, 3970, 1492, 3856, 3586, 1175, 4321, 4020, 4144, 1224, 1199, 3667, 2778, 4412, 4407, 1812, 1810, 3823, 1416, 1427, 1507, 1878, 4333, 3146, 4281, 4211, 1179, 3843, 1669, 1677, 1524, 1525, 1974, 384, 1979, 1456, 1239, 4167, 3740, 1876, 1388, 1967, 1474, 385, 1342, 1471, 4176, 1232, 1989, 4125, 1741, 1508, 1580, 4060, 4378, 1576, 1212, 1893, 3921, 3585, 1174, 1396, 4061, 4015, 1207, 3698, 3825, 3922, 4021, 4181, 1598, 1916, 1429, 4502, 4231, 1321, 4390, 3693, 3734, 1382, 3684, 1747, 3806, 3896, 3635, 1768, 4025, 3976, 3840, 3963, 4286, 1502, 3836, 4161, 3659, 3743, 4130, 3605, 1385, 1783, 4392, 4328, 1316, 4173, 4265, 1246, 1985, 1629, 1829, 1737, 3826, 1473, 1992, 1883, 1656, 1837, 1914, 1839, 1834, 3984, 4495, 3910, 4160, 3671, 4184, 4132, 4250, 1503, 1237, 1523, 1417, 4063, 1562, 3977, 1971, 1707, 1847, 1792, 3769, 4074, 1534, 4239, 4003, 3915, 1689, 1776, 1599, 1265, 1410, 1823, 1498, 1329, 939, 386, 940, 1655, 3874, 4261, 3626, 1791, 3579, 1644, 3936, 4054, 4260, 4359, 4131, 4297, 4357, 4022, 3770, 4046, 1222, 1996, 3788, 4169, 1925, 3953, 4228, 4226, 4277, 4101, 1889, 1369, 3797, 4088, 4019, 3771, 3632, 1402, 388, 1520, 1767, 1466, 1194, 4137, 1908, 1927, 1758, 3772, 3661, 4186, 4174, 1170, 3850, 1315, 1611, 1530, 1859, 2209, 4183, 1408, 1403, 941, 4033, 3623, 3596, 1461, 1848, 1173, 1928, 1459, 1765, 1826, 3719, 1931, 3584, 4004, 3591, 3967, 4168, 3957, 3878, 4165, 4191, 3980, 4058, 4200, 4336, 3958, 1260, 4051, 3798, 4032, 1774, 4322, 3991, 4106, 1641, 1570, 3978, 3965, 4464, 3813, 4154, 1365, 4257, 3846, 4345, 4379, 3603, 1693, 3937, 3801, 1787, 1214, 4483, 4201, 1898, 1845, 1226, 1220, 4245, 1347, 3867, 1900, 3640, 3916, 4089, 1209, 3745, 3988, 3975, 4236, 4075, 4146, 4256, 4308, 4000, 4148, 3588, 3868, 4403, 3883, 4326, 4393, 3895, 4237, 3955, 3727, 4005, 4092, 4372, 4283, 1553, 3805, 4151, 1281, 1681, 4489, 3982, 4437, 3597, 4342, 3872, 3987, 4490, 3876, 3668, 4300, 1679, 1242, 3598, 3583, 3647, 389, 4304, 3793, 3779, 1937, 1907, 4042, 3648, 3996, 3800, 4367, 4099, 1807, 3887, 4428, 1625, 1390, 1884, 1682, 4364, 4306, 3869, 1278, 1672, 942, 1505, 1542, 1709, 1915, 3600, 3914, 1968, 3948, 1670, 3811, 1865, 1362, 943, 1716, 3961, 1506, 4221, 1376, 944, 1683, 4276, 1445, 1721, 1632, 3607, 1328, 1455, 1913, 1497, 1317, 1951, 1778, 1379, 3768, 4225, 1668, 2383, 945, 390, 391, 4406, 4341, 1480, 392, 393, 394, 395, 1714, 1422, 396, 2043, 946, 2265, 397, 3618, 4433, 1177, 3898, 398, 2251, 947, 948, 2212, 949, 950, 399, 951, 400, 1965, 4640, 2129, 2345, 4471, 952, 953, 401, 402, 2475, 403, 404, 4758, 955, 2437, 4139, 1482, 3602, 4434, 3721, 1592, 1825, 1698, 1519, 1352, 4202, 4409, 1977, 1917, 405, 406, 407, 408, 956, 2272, 957, 2267, 1631, 1684, 409, 2054, 3889, 958, 410, 2117, 411, 959, 412, 960, 2443, 4712, 4619, 2285, 413, 414, 415, 961, 2352, 2417, 962, 1905, 416, 963, 417, 418, 2382, 3675, 1833, 3974, 419, 964, 421, 965, 966, 967, 4919, 968, 2365, 969, 970, 422, 1897, 2056, 2309, 4733, 1272, 4754, 2207, 971, 423, 4133, 3830, 4865, 972, 424, 973, 425, 2068, 4955, 426, 974, 2109, 2380, 427, 1708, 4676, 428, 4141, 429, 430, 3749, 431, 1619, 975, 4044, 3590, 1944, 4126, 1923, 1706, 432, 976, 977, 978, 4867, 4400, 433, 434, 1606, 2143, 979, 435, 980, 2604, 2895, 981, 436, 3448, 4959, 2188, 437, 438, 2055, 1692, 982, 2388, 2433, 2243, 983, 2035, 2120, 4940, 439, 440, 2474, 442, 4900, 2052, 4764, 3862, 4055, 4358, 984, 2435, 4589, 2276, 2401, 985, 1664, 443, 2073, 2405, 986, 4309, 4045, 3854, 3682, 2491, 444, 445, 1972, 2688, 4366, 3425, 3231, 3649, 2759, 2724, 3873, 3755, 1216, 3599, 3775, 2754, 2606, 3471, 3234, 2565, 2803, 2562, 2684, 3411, 3405, 2690, 1255, 3694, 446, 3985, 3535, 1306, 4084, 3282, 447, 1353, 2168, 1780, 987, 988, 989, 2126, 448, 449, 2107, 450, 2031, 990, 451, 452, 991, 1485, 453, 992, 1728, 993, 4703, 994, 995, 454, 1696, 996, 2039, 455, 997, 4874, 998, 3116, 1869, 456, 4759, 2500, 4798, 2262, 4562, 457, 1386, 999, 458, 4768, 4982, 4778, 2040, 1000, 4981, 3879, 2698, 459, 460, 1001, 461, 1447, 462, 1002, 2042, 2339, 1003, 463, 464, 4425, 1645, 465, 1004, 466, 2328, 467, 468, 469, 1231, 1468, 470, 471, 2496, 472, 473, 1005, 474, 475, 2108, 4725, 476, 1273, 1007, 1744, 1488, 1659, 477, 478, 4598, 1604, 4753, 2493, 479, 1008, 1009, 480, 1011, 1012, 1013, 1014, 481, 4313, 482, 483, 1499, 484, 1015, 4761, 2091, 2386, 2513, 1016, 4073, 1777, 2172, 485, 2205, 4592, 4545, 486, 1458, 4274, 2122, 4905, 5003, 4599, 4796, 2152, 4539, 4528, 4904, 4842, 4986, 4846, 4650, 4595, 2195, 4681, 2142, 487, 4710, 1775, 4205, 1526, 4586, 4602, 4518, 1697, 1017, 2000, 4692, 4795, 2480, 2017, 488, 2335, 489, 4969, 1894, 1882, 1817, 1880, 490, 1018, 3917, 3616, 4311, 1800, 4473, 4085, 4401, 1310, 3783, 3765, 1538, 3870, 491, 1948, 3699, 1735, 3792, 4290, 2074, 492, 2202, 5001, 2136, 493, 2211, 4532, 494, 2421, 495, 4090, 2378, 2104, 2210, 2247, 2478, 2047, 496, 4620, 4978, 4614, 1019, 2012, 1803, 3642, 497, 1322, 4752, 1020, 498, 1021, 2235, 2302, 2488, 4665, 4540, 5006, 4699, 4608, 4781, 499, 2049, 4685, 500, 501, 1022, 502, 1333, 503, 1023, 4686, 4804, 504, 4727, 505, 506, 4938, 4805, 2065, 1890, 4891, 1024, 507, 508, 509, 2110, 1025, 510, 1026, 3608, 1732, 511, 2397, 1864, 1816, 1531, 512, 513, 2451, 3636, 5012, 4892, 514, 1699, 4593, 1027, 4987, 515, 2495, 4660, 1028, 516, 1029, 2409, 1366, 2112, 2178, 2124, 2376, 5011, 4572, 4957, 4789, 4543, 4664, 4678, 2093, 4746, 2489, 4922, 2145, 1030, 4832, 4950, 1261, 4027, 3478, 3763, 2959, 1293, 2462, 517, 3197, 1595, 3413, 2238, 2067, 1031, 2228, 518, 4698, 4616, 2057, 2305, 2133, 2061, 4526, 4617, 1032, 1033, 2429, 2311, 1675, 4785, 1797, 519, 4578, 2271, 4693, 4604, 2466, 2148, 2420, 520, 4854, 2381, 2315, 2284, 4813, 521, 1034, 522, 523, 1999, 3759, 1215, 4122, 1730, 524, 525, 526, 3966, 4573, 5008, 1035, 527, 4973, 2508, 528, 3911, 529, 3289, 1821, 530, 531, 2426, 1036, 532, 1874, 533, 534, 1037, 535, 1038, 536, 1039, 537, 538, 539, 1040, 3767, 1929, 1042, 3683, 2100, 4853, 2300, 2165, 540, 2105, 541, 1043, 4906, 542, 1338, 2292, 2021, 1616, 1901, 1796, 1517, 4331, 4332, 4466, 2719, 3803, 4123, 4233, 1824, 3129, 3087, 3505, 4158, 4254, 1449, 1044, 3720, 4351, 4414, 1673, 3453, 3254, 2501, 1649, 543, 544, 545, 546, 1045, 547, 4240, 3580, 4680, 1046, 548, 2062, 549, 1047, 550, 2598, 551, 552, 553, 3819, 1259, 4062, 1048, 554, 2841, 1049, 1050, 3515, 2219, 1433, 1323, 4301, 555, 556, 1051, 557, 558, 1052, 1053, 3738, 1567, 559, 1054, 1270, 3857, 1055, 2151, 560, 2175, 2089, 1056, 4514, 2198, 2193, 1257, 1238, 3662, 561, 2186, 1057, 4637, 562, 1058, 563, 4872, 2097, 2436, 564, 1059, 565, 566, 1060, 1061, 2231, 4203, 1899, 3981, 1062, 1303, 4116, 567, 1063, 568, 569, 570, 2367, 1946, 3620, 1064, 1514, 4002, 3679, 3964, 3707, 3666, 1348, 4273, 1804, 4497, 571, 1401, 4438, 1895, 1264, 572, 1912, 573, 3939, 4170, 4056, 1271, 1065, 1521, 1221, 1066, 1451, 1654, 1067, 3934, 4080, 4352, 574, 1700, 3739, 1565, 1419, 1811, 3950, 1690, 1397, 3716, 1569, 1465, 1437, 1674, 4337, 1285, 4268, 1183, 3726, 3881, 4134, 4347, 4012, 3938, 4066, 4198, 4416, 4164, 3630, 4229, 4292, 4193, 4325, 4375, 4371, 4432, 4215, 1753, 3944, 1409, 4195, 1729, 4223, 1540, 4455, 1068, 1069, 4512, 1723, 1070, 3750, 3633, 4070, 4104, 4162, 4235, 1863, 4346, 1881, 1071, 1814, 1572, 2418, 575, 4443, 3761, 1346, 1587, 1072, 3592, 576, 1891, 4469, 2430, 1275, 577, 1950, 1963, 4129, 1073, 1296, 1360, 1551, 3733, 4111, 3993, 4108, 3949, 1287, 1713, 1556, 1736, 1995, 1435, 1424, 1830, 1705, 1861, 1197, 1254, 4120, 1545, 4417, 1469, 1292, 2185, 2279, 1785, 1236, 4293, 1827, 3839, 3983, 4395, 1957, 2222, 578, 3928, 4295, 3715, 3855, 3609, 1990, 4076, 4175, 3927, 1757, 1650, 4299, 1773, 2004, 1267, 1364, 579, 1462, 1879, 4007, 3729, 3665, 3722, 1691, 1712, 1074, 1624, 1751, 1394, 3924, 3952, 580, 581, 2003, 1343, 2203, 1559, 1250, 1555, 582, 2395, 4114, 1818, 1075, 583, 1076, 1077, 1704, 4448, 584, 4882, 1078, 1079, 1786, 585, 3354, 1832, 586, 3432, 2891, 587, 588, 4583, 2505, 1903, 2077, 4936, 4658, 4830, 2446, 1080, 2278, 1081, 1082, 4459, 1083, 589, 1563, 1084, 2255, 2113, 590, 591, 1085, 592, 2308, 593, 594, 2274, 595, 4931, 2407, 1858, 596, 597, 598, 1453, 2559, 2590, 2738, 4478, 4069, 1809, 1327, 4150, 3260, 3481, 3672, 3625, 2008, 4439, 3852, 3997, 1411, 599, 3847, 4993, 1268, 4050, 3377, 4424, 1496, 4143, 4493, 3492, 1962, 1412, 2455, 600, 2457, 1086, 601, 4017, 4477, 1794, 2483, 2291, 602, 4263, 3072, 2009, 2199, 1754, 1087, 1088, 3888, 603, 604, 4777, 2324, 605, 1368, 3827, 4103, 606, 607, 1089, 2220, 4549, 1090, 1571, 1091, 1438, 608, 1092, 609, 2320, 2069, 610, 611, 1093, 612, 1094, 3701, 4389, 613, 4897, 1603, 614, 1095, 5000, 615, 616, 2263, 1332, 1715, 4369, 1652, 1096, 617, 1541, 618, 1921, 1733, 1373, 1870, 619, 4218, 1798, 2387, 1097, 1098, 1099, 1100, 620, 1702, 621, 622, 4801, 4855, 4847, 2398, 2239, 1101, 1667, 1384, 623, 4745, 3700, 1788, 1600, 624, 2098, 625, 4550, 4721, 4960, 4878, 2473, 4792, 4675, 1102, 1423, 626, 2771, 627, 1339, 3875, 628, 629, 3070, 4565, 2118, 2015, 4818, 2557, 2795, 2906, 2103, 4869, 2029, 3299, 3118, 4932, 4838, 4901, 4908, 4996, 4779, 4657, 4646, 4875, 4627, 4515, 4876, 4965, 4605, 4576, 2028, 4985, 4850, 1103, 4757, 4747, 1614, 1947, 2237, 630, 631, 4997, 4618, 4479, 3766, 632, 1104, 1105, 4886, 1106, 2432, 633, 1107, 4530, 634, 2371, 4651, 1108, 4536, 635, 1813, 636, 2431, 4866, 4991, 4814, 4560, 4956, 637, 4555, 1109, 4941, 4577, 4633, 2213, 638, 639, 3706, 1110, 640, 1111, 641, 4581, 4893, 4831, 2481, 4644, 4734, 2190, 4524, 4881, 4837, 4888, 4648, 642, 4807, 4896, 4868, 2374, 1112, 4823, 2164, 1113, 3735, 3390, 1694, 3431, 2838, 3483, 3464, 3848, 2558, 3314, 3086, 3029, 2956, 3517, 2651, 2914, 2680, 2632, 3121, 3100, 3528, 3526, 3084, 4220, 3304, 2846, 1186, 3235, 2903, 3559, 2687, 3409, 3237, 2900, 2999, 3349, 3171, 2752, 3262, 3504, 3047, 4376, 3193, 3430, 2525, 2670, 2911, 3508, 2776, 2697, 3200, 2790, 3323, 2543, 2874, 2614, 3904, 3373, 3054, 2617, 4242, 3621, 2708, 4179, 4398, 3959, 4935, 1269, 3095, 1286, 3624, 4481, 1432, 3511, 2735, 4381, 3295, 1585, 2390, 1568, 1114, 1766, 3221, 2643, 2739, 643, 4735, 4760, 4629, 1115, 4918, 4688, 3920, 644, 4723, 4949, 4748, 4607, 4719, 1116, 645, 646, 4611, 2353, 4645, 4603, 4762, 4819, 2221, 4636, 4992, 4998, 2307, 647, 1801, 4279, 3762, 1637, 1509, 4843, 4797, 4590, 4995, 4541, 2200, 4580, 4858, 648, 649, 2502, 1117, 4780, 4800, 2477, 4724, 4551, 4674, 1118, 1119, 2965, 2369, 2695, 3293, 650, 651, 4730, 4862, 4722, 4944, 1120, 652, 1121, 4983, 4784, 4877, 4643, 653, 654, 4909, 1122, 3264, 655, 2076, 4849, 656, 657, 2447, 658, 659, 4035, 2910, 3391, 2808, 3099, 2913, 3676, 2852, 3284, 2731, 1609, 2375, 2201, 3537, 3994, 1319, 4467, 1802, 1227, 1623, 660, 4844, 2086, 4770, 4714, 4979, 4812, 2192, 1123, 661, 2364, 662, 663, 664, 1124, 1125, 665, 2487, 4899, 2138, 1126, 666, 667, 4569, 4554, 4917, 2322, 1127, 1128, 1129, 668, 669, 1130, 670, 1131, 1527, 1132, 671, 1772, 2314, 1133, 1134, 2470, 1135, 672, 2236, 4716, 673, 4600, 2196, 2456, 4606, 4588, 4963, 4851, 4558, 4557, 4697, 4610, 4773, 4687, 4708, 4910, 2123, 1136, 1137, 2358, 5005, 2208, 4952, 4945, 1933, 1731, 1793, 675, 676, 3342, 1138, 677, 4597, 4870, 1140, 4990, 4954, 4916, 678, 1141, 4737, 4527, 2253, 4531, 679, 1142, 1143, 680, 4771, 1144, 4638, 681, 4705, 4525, 4522, 4898, 2325, 2415, 5004, 1145, 682, 683, 2141, 1146, 684, 685, 2445, 686, 687, 4861, 2157, 688, 3822, 689, 690, 4743, 691, 1147, 1601, 692, 1148, 693, 4537, 4825, 4625, 4621, 3905, 694, 695, 1414, 1149, 696, 2027, 2159, 4756, 4690, 4859, 4793, 4575, 2160, 4828, 4731, 4718, 4802, 4750, 1150, 2081, 2258, 697, 1795, 1372, 1695, 1866, 1151, 4115, 1719, 2280, 4662, 698, 2176, 2194, 2217, 1920, 699, 700, 701, 4999, 1544, 4739, 702, 703, 4031, 4305, 1636, 1393, 2010, 3810, 4452, 3677, 4227, 1277, 1400, 4402, 4157, 4197, 1337, 1253, 1532, 4028, 3989, 2449, 4715, 704, 2050, 1493, 1854, 1902, 1510, 1152, 4824, 705, 2340, 4182, 706, 2442, 2484, 707, 708, 709, 4667, 1153, 2412, 4732, 4476, 2053, 710, 1375, 711, 712, 713, 4829, 4738, 4811, 4570, 4961, 1245, 714, 2045, 4707, 715, 2169, 4713, 1841, 4234, 4924, 1154, 1314, 4096, 2023, 716, 717, 4895, 718, 1155, 719, 720, 2063, 1311, 721, 4642, 722, 4833, 4903, 4885, 4666, 2249, 4217, 1156, 723, 1157, 1627, 2116, 4566, 2287, 1158, 2330, 4826, 4622, 4740, 724, 4700, 725, 1159, 5013, 4894, 726, 2434, 1953, 1160, 1201, 727, 3787, 2046, 1161, 728, 729, 2485, 2044, 4568, 3747, 2248, 730, 731, 2024, 1846, 2507, 2368, 1162, 2019, 2333, 3815, 2005, 2266, 1964, 2347, 2385, 732, 2177, 2059, 4958, 4927, 1822, 4815, 1262, 2094, 4480, 1537, 1291, 2419, 1318, 2283, 4976, 4628, 4294, 2486, 4926, 1582, 2162, 733, 4587, 734, 735, 3439, 2833, 4287, 4509, 4505, 4267, 3697, 3272, 4112, 2967, 3651, 1991, 1805, 1628, 3705, 2479, 736, 1195, 4863, 1163, 3859, 1164, 2394, 1165, 2355, 2351, 4679, 4835, 2259, 4839, 4571, 1166, 4968, 2250, 4912, 2423, 737, 1167, 4989, 4684, 4669, 4552, 4612, 2127, 1745, 1973, 4767, 1168, 2273, 2310, 3807, 4307, 1169, 2303, 1454, or 1781. In some aspects, the 581 to 589 region of the VP capsid polypeptide has a sequence of any one of SEQ ID NOs: 2498, 4884, 738, 739, 4177, 1289, 740, 14, 15, 741, 742, 743, 16, 744, 17, 18, 745, 3477, 1548, 3051, 2982, 2171, 2877, 746, 19, 20, 3036, 3426, 3073, 3169, 747, 2406, 3362, 2784, 4889, 21, 3192, 4942, 22, 23, 1638, 748, 24, 25, 749, 26, 27, 1703, 1836, 28, 2038, 2301, 3660, 29, 750, 30, 31, 32, 2095, 1640, 33, 35, 36, 37, 4742, 2450, 38, 4925, 39, 751, 752, 1653, 1205, 3795, 753, 4288, 4219, 2770, 2962, 4241, 4107, 2718, 3317, 4391, 4053, 3263, 2553, 3947, 2710, 2608, 3467, 2796, 2961, 2529, 3320, 2674, 2635, 3446, 3053, 3250, 3688, 1182, 1998, 4320, 3351, 2655, 3514, 2779, 3194, 3319, 3224, 3281, 3708, 2807, 3562, 3274, 3374, 3013, 3416, 2981, 3065, 2777, 3469, 2977, 2638, 2972, 3059, 2574, 3380, 4262, 3167, 3368, 2781, 3547, 3386, 1225, 2960, 3485, 3370, 3443, 2824, 754, 1467, 3327, 3178, 3006, 3252, 2991, 3470, 2888, 2572, 3418, 2642, 2519, 3363, 40, 2633, 41, 42, 43, 755, 2511, 44, 45, 756, 46, 757, 47, 48, 1952, 758, 2341, 2410, 49, 3122, 2551, 3718, 4806, 2216, 3484, 3577, 759, 2080, 50, 1308, 1230, 3960, 1378, 2994, 3080, 2589, 3681, 51, 4694, 2257, 52, 760, 53, 2389, 4934, 4951, 761, 762, 4659, 54, 2146, 3925, 55, 3654, 2087, 2346, 4766, 4682, 4984, 4744, 56, 763, 764, 4626, 4702, 58, 59, 60, 61, 4086, 1740, 1660, 765, 766, 62, 1966, 2032, 2499, 2332, 767, 63, 2096, 2181, 4913, 64, 768, 769, 770, 2384, 2402, 771, 65, 66, 2111, 67, 772, 2458, 2197, 68, 3816, 69, 2599, 2706, 2497, 70, 2234, 2183, 2399, 71, 4769, 2366, 72, 73, 74, 3865, 1549, 1361, 2453, 3882, 773, 3713, 1942, 75, 1312, 4501, 76, 77, 774, 1413, 775, 776, 78, 1560, 4289, 3757, 79, 3593, 4043, 1806, 3908, 4397, 1615, 4415, 3723, 2006, 3754, 1470, 4360, 80, 3945, 2854, 3523, 3669, 1356, 777, 2132, 2379, 82, 4065, 83, 84, 2030, 1294, 2413, 2064, 1484, 85, 4594, 86, 778, 87, 3891, 4456, 4040, 4496, 1982, 2001, 1478, 1189, 88, 1490, 1885, 1926, 89, 90, 91, 779, 2270, 780, 2161, 1180, 92, 781, 782, 783, 93, 2356, 784, 785, 786, 94, 95, 787, 788, 1831, 1867, 96, 4458, 97, 1970, 4656, 2173, 1936, 2349, 1590, 4585, 98, 99, 100, 789, 790, 1298, 101, 1688, 791, 792, 2007, 2070, 102, 793, 4632, 103, 794, 795, 104, 105, 106, 2229, 796, 4980, 4691, 107, 2440, 1849, 108, 2014, 797, 4736, 2509, 2018, 2227, 4787, 109, 1579, 110, 1906, 111, 2428, 798, 112, 2411, 113, 2359, 799, 4848, 800, 2461, 1444, 2313, 2350, 4579, 4821, 801, 114, 2329, 4834, 115, 1344, 116, 802, 117, 118, 119, 4929, 4677, 120, 2158, 121, 803, 804, 1463, 805, 122, 2139, 2290, 1760, 2465, 2424, 2058, 2230, 124, 4717, 806, 125, 126, 2370, 127, 4521, 128, 4971, 4994, 807, 2085, 129, 130, 131, 132, 4933, 808, 2336, 2026, 2204, 809, 810, 2281, 133, 1978, 134, 811, 812, 135, 136, 137, 138, 813, 814, 139, 4673, 140, 815, 1326, 141, 142, 143, 2344, 4544, 144, 145, 816, 4654, 4816, 1634, 1302, 817, 146, 818, 147, 148, 149, 4546, 150, 151, 152, 153, 154, 155, 819, 820, 156, 2149, 157, 2295, 821, 158, 159, 160, 161, 4631, 2441, 162, 163, 164, 165, 166, 822, 167, 168, 169, 170, 171, 823, 172, 4613, 824, 1651, 173, 1483, 174, 175, 825, 176, 177, 178, 179, 4624, 2170, 4809, 4520, 180, 826, 827, 181, 828, 4695, 4911, 182, 4582, 4873, 4596, 2020, 183, 4641, 829, 184, 185, 2244, 4647, 186, 187, 188, 189, 190, 2114, 830, 191, 192, 193, 194, 2071, 4615, 2361, 195, 4852, 2187, 4914, 4947, 196, 1391, 197, 4534, 4726, 4788, 198, 199, 4920, 831, 2240, 2223, 200, 201, 202, 203, 2106, 2503, 4775, 204, 205, 832, 833, 206, 834, 2232, 2294, 207, 2166, 208, 209, 210, 835, 836, 1334, 837, 3901, 3312, 2649, 1301, 211, 212, 1450, 4386, 3028, 213, 1446, 214, 2206, 215, 1896, 1522, 3490, 838, 216, 2241, 217, 218, 4653, 219, 1612, 220, 221, 222, 839, 223, 4953, 2360, 840, 224, 4928, 4741, 225, 2088, 4751, 5007, 4542, 226, 227, 4890, 4519, 4883, 228, 4786, 229, 230, 231, 2393, 2448, 841, 842, 232, 233, 4782, 234, 4962, 2269, 843, 235, 844, 236, 237, 4930, 845, 846, 238, 847, 4704, 239, 848, 849, 2150, 850, 851, 852, 853, 1536, 240, 854, 241, 242, 243, 244, 245, 246, 247, 248, 4923, 2245, 4696, 855, 4634, 856, 249, 250, 251, 252, 253, 254, 255, 857, 2115, 4880, 256, 257, 258, 259, 858, 859, 260, 261, 860, 861, 862, 262, 4966, 863, 864, 263, 4749, 4970, 2296, 2318, 865, 2326, 264, 1241, 265, 266, 866, 1477, 267, 867, 4977, 268, 868, 269, 4668, 5002, 270, 869, 870, 271, 871, 872, 272, 4822, 4709, 873, 4655, 4972, 2392, 874, 1252, 273, 1591, 4975, 875, 274, 2025, 275, 1980, 276, 876, 877, 2066, 277, 278, 279, 4670, 280, 2323, 2288, 2334, 4689, 281, 878, 1892, 879, 1539, 2214, 2215, 880, 2327, 881, 882, 4601, 883, 1295, 3601, 3877, 1930, 1420, 1678, 1460, 2306, 884, 282, 1799, 283, 284, 4988, 4553, 4772, 4817, 2260, 285, 1626, 2082, 885, 286, 1374, 886, 2119, 2468, 287, 1620, 1290, 2425, 2482, 4671, 2282, 288, 2354, 1354, 2033, 289, 887, 290, 888, 291, 1956, 2467, 889, 2357, 4547, 4765, 292, 4794, 2391, 4324, 890, 294, 295, 4138, 891, 2297, 296, 2224, 3903, 297, 892, 3829, 298, 299, 3809, 4271, 3844, 1436, 300, 1515, 1617, 4701, 2174, 301, 1961, 4649, 5010, 302, 303, 304, 305, 2452, 2147, 306, 2293, 1589, 893, 4370, 4841, 2342, 307, 308, 309, 894, 2246, 2155, 3646, 4059, 1431, 1331, 310, 311, 4836, 4948, 312, 895, 1779, 313, 314, 315, 316, 896, 1558, 1552, 317, 2312, 318, 319, 897, 320, 898, 321, 322, 899, 1958, 2022, 2016, 900, 2454, 323, 2427, 2134, 324, 901, 325, 902, 326, 2373, 4803, 2459, 1491, 327, 328, 903, 2463, 2264, 329, 330, 904, 1635, 4820, 905, 2506, 331, 4706, 2092, 4484, 1756, 906, 907, 4661, 2179, 4584, 332, 4907, 4635, 4529, 4683, 4523, 4561, 333, 2337, 3536, 2701, 2799, 3332, 3294, 3159, 3069, 2637, 3025, 2782, 3247, 3350, 2692, 2586, 3004, 3049, 2694, 2650, 3554, 2983, 3403, 3214, 3163, 2541, 3090, 3097, 3462, 1430, 2941, 3486, 2842, 3558, 3104, 3037, 3419, 2780, 2931, 1276, 2928, 2609, 3068, 3128, 2548, 2538, 2618, 2789, 3228, 2657, 3189, 2128, 2863, 3307, 3300, 2546, 3048, 3543, 2946, 2975, 3346, 3067, 2728, 2955, 3408, 3027, 3094, 3203, 2988, 2751, 2953, 2566, 2578, 2823, 3063, 3335, 3000, 3181, 3011, 3138, 3389, 2805, 3074, 2894, 3149, 2560, 3417, 3265, 3378, 2901, 2837, 2822, 2745, 3473, 3530, 3040, 2597, 3509, 3522, 3161, 2926, 3209, 3105, 3400, 2630, 2905, 2671, 2818, 2806, 2702, 2709, 2400, 3549, 3538, 2534, 2773, 2623, 3491, 3243, 3136, 2693, 3164, 3343, 2918, 2555, 2794, 2679, 3510, 3110, 2672, 3442, 2929, 3184, 3488, 2135, 4763, 3414, 3093, 2996, 3141, 3544, 3102, 2856, 2957, 3466, 3461, 2788, 2660, 3344, 3204, 2720, 3379, 2826, 1789, 2396, 2785, 3249, 3527, 4460, 3352, 2051, 2569, 4457, 2011, 4857, 2163, 4783, 4319, 3906, 1533, 1755, 1888, 4248, 1557, 2153, 3804, 1363, 1934, 1602, 1404, 4188, 1330, 4349, 3337, 3533, 2629, 3038, 2539, 3567, 3291, 3348, 3115, 3359, 2993, 3079, 3506, 2527, 2963, 2938, 2516, 3113, 1345, 2639, 3143, 3044, 2747, 3154, 3280, 3039, 2743, 2902, 3056, 2554, 2522, 3103, 3210, 3434, 2656, 4251, 4166, 4196, 3206, 3328, 2588, 3553, 2714, 3078, 3222, 3137, 3357, 2717, 2944, 3012, 3220, 3202, 2811, 3083, 3269, 3566, 2699, 2515, 3023, 2533, 3288, 3075, 3005, 2685, 3058, 2976, 2622, 3333, 3463, 2939, 3521, 3268, 3117, 2626, 2616, 3240, 2570, 3565, 2919, 3157, 2849, 3444, 2631, 3420, 2659, 3325, 3186, 2920, 3258, 3440, 3457, 3310, 2761, 3134, 2621, 3531, 2711, 2774, 2867, 2585, 3155, 2620, 3156, 2844, 3126, 3160, 2909, 3542, 3225, 2887, 3474, 3218, 2744, 2896, 3135, 3424, 3498, 3529, 2661, 2667, 2549, 2819, 2768, 2935, 3182, 2772, 3230, 3043, 2922, 3581, 3524, 2869, 2610, 3298, 2775, 3108, 2603, 3614, 2612, 2860, 3187, 3238, 3786, 4385, 3016, 3436, 2876, 2987, 3532, 3438, 3561, 3259, 2663, 2890, 3433, 3071, 3018, 2580, 2755, 3015, 2540, 3398, 2664, 2583, 2830, 2644, 2641, 3513, 2725, 2723, 3338, 3556, 2866, 2514, 2932, 2753, 2862, 2899, 2605, 2989, 3096, 3124, 2985, 2716, 3145, 3017, 2591, 2640, 3033, 1853, 3216, 3316, 3412, 2971, 3256, 3153, 3575, 3339, 2915, 2531, 3552, 3475, 3060, 3375, 2756, 3382, 2847, 2859, 3251, 3702, 3423, 2537, 2801, 3076, 2696, 3092, 3459, 3144, 3441, 2802, 3479, 2907, 3512, 3518, 3021, 2871, 3032, 2647, 2945, 3045, 2763, 3313, 3034, 3315, 3541, 2746, 2669, 2524, 3003, 2732, 3166, 3046, 3306, 2873, 3364, 3253, 3215, 3061, 2804, 2722, 2964, 2990, 2836, 4098, 4449, 3173, 2762, 3737, 2628, 3507, 2564, 3031, 2872, 3360, 2658, 2930, 2904, 3244, 3217, 3311, 3445, 2840, 3372, 2958, 3098, 3356, 3456, 3388, 2624, 3207, 2576, 2742, 2665, 2815, 3052, 3421, 2593, 3242, 2535, 2966, 2898, 2858, 2943, 2668, 2798, 3196, 2528, 2713, 3001, 2691, 2948, 2767, 2544, 3302, 2734, 2893, 2592, 2861, 3502, 2969, 2582, 3229, 2676, 2545, 3255, 3330, 2547, 3257, 2882, 3151, 3088, 2883, 3318, 2645, 2733, 2587, 3500, 3008, 2715, 2845, 3183, 2654, 3233, 3267, 2741, 2827, 2704, 3091, 2832, 2736, 3177, 3271, 2835, 2908, 3176, 2947, 3292, 3191, 2517, 3026, 3082, 3392, 3381, 2584, 2712, 3213, 3451, 2634, 3150, 2810, 3303, 2573, 3460, 2615, 3394, 2828, 3329, 4377, 4499, 3555, 2974, 3782, 3629, 3578, 3885, 2817, 3248, 2954, 3334, 3571, 3345, 3551, 3384, 3422, 1357, 1844, 2530, 2973, 4418, 4081, 3951, 1764, 1671, 1852, 334, 1843, 3449, 3185, 3399, 2786, 3055, 3472, 3397, 2601, 3564, 3277, 4373, 3548, 3179, 3407, 3841, 3347, 3142, 4255, 4431, 3241, 3077, 2700, 3147, 2648, 3283, 2829, 3278, 2581, 2536, 4363, 2848, 3410, 2797, 2523, 2520, 2721, 3496, 2571, 3198, 3219, 3030, 2673, 2921, 3837, 3301, 3322, 2705, 3239, 2949, 3369, 3396, 2892, 2897, 2766, 3174, 3297, 2550, 2889, 2933, 2793, 2627, 2677, 3119, 2596, 3226, 3172, 3089, 2868, 2839, 3942, 3120, 3286, 2843, 3465, 1564, 3946, 4222, 1504, 3999, 2682, 1875, 2865, 3539, 3168, 2864, 3308, 3557, 2940, 3109, 3503, 2625, 3455, 3114, 2595, 3331, 2978, 2518, 2521, 4079, 3024, 3573, 2952, 2653, 1769, 3180, 2813, 2652, 2600, 2816, 3201, 3188, 3270, 2997, 2992, 3009, 3520, 2936, 3275, 3165, 3447, 3131, 3305, 2809, 2792, 2729, 2814, 2619, 3266, 2825, 3066, 2857, 2998, 3064, 2681, 3035, 3279, 2764, 3480, 3127, 2912, 3010, 2607, 3211, 3111, 3041, 1573, 3909, 4269, 3487, 3489, 3019, 335, 1266, 1415, 2980, 3428, 2444, 3435, 3482, 3020, 2748, 2646, 2787, 2760, 2563, 3085, 3133, 3158, 3170, 2703, 3494, 2556, 2552, 3395, 3245, 3404, 2675, 2791, 2252, 4845, 1911, 4856, 908, 1935, 4711, 4728, 2460, 4517, 2749, 3341, 3355, 2575, 2942, 2886, 2758, 2594, 3495, 2884, 3516, 3042, 2737, 2923, 3563, 2855, 3476, 2611, 2937, 3383, 3497, 3402, 3162, 2662, 2875, 3223, 2878, 2079, 1808, 3285, 2757, 3057, 2951, 3519, 2579, 2853, 3387, 3401, 3493, 3393, 1608, 3365, 2885, 3574, 3081, 3007, 3568, 3152, 3367, 3358, 336, 2268, 3468, 3290, 3550, 3132, 2726, 2879, 3190, 3309, 2613, 2765, 3106, 1355, 3454, 2851, 2881, 3232, 3458, 3326, 3353, 2927, 3212, 2950, 3376, 3208, 3062, 3612, 3195, 3385, 2686, 2602, 3569, 3123, 2727, 1622, 2821, 2636, 2750, 2850, 3050, 2925, 3336, 3540, 2689, 3139, 2526, 3361, 3022, 3427, 3107, 3140, 3371, 3276, 2831, 3501, 2924, 3366, 3199, 3101, 3321, 3499, 2917, 2683, 2800, 2812, 3340, 3227, 3148, 3657, 4446, 1746, 1464, 1886, 2666, 3246, 3130, 3560, 3236, 2730, 3572, 1607, 3689, 2968, 1457, 1500, 909, 337, 1184, 3450, 2577, 2567, 2532, 3415, 2934, 2984, 2568, 4147, 3002, 2986, 910, 2979, 2542, 2492, 1762, 4472, 1472, 1529, 2319, 2131, 4057, 2048, 1976, 4507, 1583, 338, 2078, 2372, 339, 911, 1711, 340, 912, 2013, 913, 2277, 914, 341, 915, 4672, 4902, 916, 342, 1594, 4440, 917, 343, 344, 4559, 918, 2233, 919, 345, 920, 346, 921, 922, 347, 2226, 348, 2180, 2298, 349, 350, 2099, 2036, 351, 4808, 923, 924, 4498, 1518, 3728, 3637, 3570, 3429, 4091, 2870, 2995, 4338, 3205, 2880, 3261, 1994, 3968, 4291, 4204, 4071, 4034, 1742, 2820, 3912, 3287, 1218, 1190, 4145, 353, 2422, 354, 355, 925, 1782, 2184, 2261, 2490, 926, 927, 928, 4630, 2137, 3610, 356, 357, 4729, 358, 359, 4224, 1918, 1959, 1840, 3736, 2471, 1770, 929, 930, 931, 4155, 360, 361, 362, 932, 363, 364, 1279, 2289, 365, 1543, 366, 2156, 2472, 367, 4049, 1633, 1722, 368, 369, 1495, 1566, 370, 4967, 372, 373, 1211, 1873, 2101, 2494, 1726, 374, 1442, 933, 1748, 4142, 1434, 1358, 1191, 3732, 4110, 4039, 4411, 4506, 4270, 4156, 3780, 4036, 4030, 4016, 1550, 3899, 1247, 1855, 1181, 3919, 1639, 3664, 1244, 4140, 3930, 4117, 4189, 4001, 3799, 3643, 3619, 1240, 1686, 1479, 1307, 1575, 4296, 1665, 3871, 4135, 1605, 4408, 3604, 1274, 4149, 1313, 3741, 1938, 3709, 1727, 3893, 1280, 3622, 1784, 3834, 1752, 1983, 1743, 3979, 4461, 4113, 3817, 4232, 1340, 1489, 4214, 3902, 1857, 2316, 1904, 1219, 1486, 1512, 1481, 1516, 3820, 3789, 4252, 4047, 4330, 4082, 4094, 1574, 1248, 4078, 1872, 1426, 3785, 3687, 4318, 4243, 3866, 3704, 4172, 1621, 4315, 1192, 1513, 1856, 3324, 2769, 2678, 1561, 3296, 375, 2343, 376, 377, 1395, 1584, 4093, 4453, 3940, 3778, 4374, 4210, 4009, 4264, 4339, 4368, 1738, 378, 1610, 4194, 4474, 4013, 4266, 1771, 1759, 1922, 3860, 3832, 1349, 1381, 3663, 1642, 1185, 4356, 3932, 1233, 4212, 3858, 1198, 4192, 3611, 1919, 1819, 3790, 3712, 1969, 4095, 1887, 4468, 1720, 4247, 934, 1790, 2002, 1657, 1663, 1336, 3894, 1554, 1494, 1405, 3576, 4314, 3695, 1851, 1850, 4362, 1815, 3845, 4511, 3656, 3638, 1406, 1596, 4454, 1443, 1661, 935, 4504, 1359, 1734, 3650, 1910, 1305, 1648, 3831, 4435, 1208, 1988, 4451, 1993, 1986, 3849, 1718, 4068, 1835, 1425, 1428, 1282, 4380, 1658, 1452, 1687, 4024, 379, 4072, 3791, 4491, 4323, 4014, 1304, 1440, 1511, 1981, 1676, 1547, 4422, 1283, 3861, 1383, 3644, 3691, 4259, 1749, 1418, 1176, 4216, 1924, 1421, 3992, 4423, 4253, 1618, 1871, 1256, 3748, 4119, 1297, 1586, 1251, 1299, 1954, 4450, 3990, 4029, 4097, 3890, 3796, 1389, 3711, 4344, 1578, 1476, 4343, 1202, 4413, 4384, 3808, 1647, 1475, 3892, 3674, 1739, 3926, 3595, 1943, 3756, 4405, 3973, 4109, 4159, 3744, 4387, 1960, 4275, 3781, 1535, 1210, 4492, 4365, 4118, 3655, 3886, 4278, 4383, 4485, 1392, 3751, 3931, 3986, 3678, 1249, 4353, 4208, 3710, 4238, 4213, 3969, 4436, 3175, 4128, 2970, 1228, 3534, 3437, 3406, 3641, 3639, 3954, 4335, 3995, 3582, 4475, 3784, 4470, 4010, 3802, 3941, 4427, 4396, 4348, 3587, 3818, 3864, 3956, 3863, 3731, 3814, 4067, 4354, 4350, 4334, 3821, 1932, 3929, 4171, 1258, 3824, 3631, 4465, 4494, 1320, 1398, 3828, 1204, 1223, 1284, 1685, 3773, 4209, 3014, 4462, 4246, 4190, 4312, 4023, 3760, 3753, 1178, 3884, 2783, 4038, 3545, 2916, 3112, 2834, 3880, 3673, 4102, 4399, 4048, 3752, 4207, 1235, 3943, 4355, 4087, 4100, 4327, 4037, 4163, 3918, 4486, 1243, 3933, 4178, 1662, 1643, 4152, 3634, 3617, 4445, 4303, 1370, 3838, 4199, 4284, 1213, 4382, 1399, 1187, 3714, 1828, 4487, 3615, 1842, 1501, 3746, 4018, 4420, 3606, 4121, 3724, 3935, 4419, 4282, 1955, 1949, 4310, 4488, 1577, 4127, 1288, 1171, 3670, 4052, 3627, 3777, 936, 1371, 3685, 1325, 1940, 380, 4482, 4258, 3812, 1581, 1860, 4124, 4508, 4500, 3652, 3972, 1309, 1630, 1528, 3717, 1217, 3692, 4430, 3764, 4316, 4285, 3645, 3971, 4421, 1172, 4026, 2740, 3125, 3546, 1725, 1206, 3842, 4404, 3690, 3962, 4513, 4340, 4329, 4410, 3703, 4136, 1763, 1487, 3589, 3907, 4153, 2707, 3730, 4426, 4180, 4041, 3923, 4444, 3851, 4429, 4361, 1441, 4394, 4302, 3758, 4510, 3742, 1868, 4077, 1710, 1939, 1335, 1666, 1407, 4187, 1193, 1188, 1196, 1724, 1717, 1200, 1646, 1997, 1975, 1701, 4280, 1613, 4006, 1984, 1351, 3653, 3833, 1593, 2561, 4442, 3900, 4298, 1761, 4388, 1820, 1597, 4317, 4249, 1341, 1203, 1680, 4441, 3628, 3725, 1945, 937, 4206, 1588, 1439, 3794, 4447, 1838, 3776, 3658, 4064, 1377, 4011, 4272, 4503, 1324, 1367, 3594, 3680, 1300, 1750, 3913, 3774, 1877, 1987, 1862, 3998, 1380, 4185, 3686, 3696, 4463, 1350, 4008, 4230, 3853, 4244, 4083, 381, 1909, 3897, 1546, 382, 3613, 3273, 3452, 3525, 1229, 4105, 3835, 383, 1263, 1234, 3970, 1492, 3856, 3586, 1175, 4321, 4020, 4144, 1224, 1199, 3667, 2778, 4412, 4407, 1812, 1810, 3823, 1416, 1427, 1507, 1878, 4333, 3146, 4281, 4211, 1179, 3843, 1669, 1677, 1524, 1525, 1974, 384, 1979, 1456, 1239, 4167, 3740, 1876, 1388, 1967, 1474, 385, 1342, 1471, 4176, 1232, 1989, 4125, 1741, 1508, 1580, 4060, 4378, 1576, 1212, 1893, 3921, 3585, 1174, 1396, 4061, 4015, 1207, 3698, 3825, 3922, 4021, 4181, 1598, 1916, 1429, 4502, 4231, 1321, 4390, 3693, 3734, 1382, 3684, 1747, 3806, 3896, 3635, 1768, 4025, 3976, 3840, 3963, 4286, 1502, 3836, 4161, 3659, 3743, 4130, 3605, 1385, 1783, 4392, 4328, 1316, 4173, 4265, 1246, 1985, 1629, 1829, 1737, 3826, 1473, 1992, 1883, 1656, 1837, 1914, 1839, 1834, 3984, 4495, 3910, 4160, 3671, 4184, 4132, 4250, 1503, 1237, 1523, 1417, 4063, 1562, 3977, 1971, 1707, 1847, 1792, 3769, 4074, 1534, 4239, 4003, 3915, 1689, 1776, 1599, 1265, 1410, 1823, 1498, 1329, 939, 386, 940, 1655, 3874, 4261, 3626, 1791, 3579, 1644, 3936, 4054, 4260, 4359, 4131, 4297, 4357, 4022, 3770, 4046, 1222, 1996, 3788, 4169, 1925, 3953, 4228, 4226, 4277, 4101, 1889, 1369, 3797, 4088, 4019, 3771, 3632, 1402, 388, 1520, 1767, 1466, 1194, 4137, 1908, 1927, 1758, 3772, 3661, 4186, 4174, 1170, 3850, 1315, 1611, 1530, 1859, 2209, 4183, 1408, 1403, 941, 4033, 3623, 3596, 1461, 1848, 1173, 1928, 1459, 1765, 1826, 3719, 1931, 3584, 4004, 3591, 3967, 4168, 3957, 3878, 4165, 4191, 3980, 4058, 4200, 4336, 3958, 1260, 4051, 3798, 4032, 1774, 4322, 3991, 4106, 1641, 1570, 3978, 3965, 4464, 3813, 4154, 1365, 4257, 3846, 4345, 4379, 3603, 1693, 3937, 3801, 1787, 1214, 4483, 4201, 1898, 1845, 1226, 1220, 4245, 1347, 3867, 1900, 3640, 3916, 4089, 1209, 3745, 3988, 3975, 4236, 4075, 4146, 4256, 4308, 4000, 4148, 3588, 3868, 4403, 3883, 4326, 4393, 3895, 4237, 3955, 3727, 4005, 4092, 4372, 4283, 1553, 3805, 4151, 1281, 1681, 4489, 3982, 4437, 3597, 4342, 3872, 3987, 4490, 3876, 3668, 4300, 1679, 1242, 3598, 3583, 3647, 389, 4304, 3793, 3779, 1937, 1907, 4042, 3648, 3996, 3800, 4367, 4099, 1807, 3887, 4428, 1625, 1390, 1884, 1682, 4364, 4306, 3869, 1278, 1672, 942, 1505, 1542, 1709, 1915, 3600, 3914, 1968, 3948, 1670, 3811, 1865, 1362, 943, 1716, 3961, 1506, 4221, 1376, 944, 1683, 4276, 1445, 1721, 1632, 3607, 1328, 1455, 1913, 1497, 1317, 1951, 1778, 1379, 3768, 4225, 1668, 2383, 945, 390, 391, 4406, 4341, 1480, 392, 393, 394, 395, 1714, 1422, 396, 2043, 946, 2265, 397, 3618, 4433, 1177, 3898, 398, 2251, 947, 948, 2212, 949, 950, 399, 951, 400, 1965, 4640, 2129, 2345, 4471, 952, 953, 402, 2475, 403, 404, 4758, 955, 2437, 4139, 1482, 3602, 4434, 3721, 1592, 1825, 1698, 1519, 1352, 4202, 4409, 1977, 1917, 405, 406, 407, 408, 956, 2272, 957, 2267, 1631, 1684, 409, 2054, 3889, 958, 410, 2117, 411, 959, 412, 960, 2443, 4712, 4619, 2285, 414, 415, 961, 2352, 2417, 962, 1905, 416, 963, 417, 418, 3675, 1833, 3974, 419, 964, 421, 965, 966, 967, 968, 2365, 969, 970, 422, 1897, 2056, 2309, 4733, 1272, 4754, 2207, 971, 423, 4133, 3830, 4865, 972, 424, 973, 425, 2068, 4955, 426, 974, 427, 1708, 4676, 428, 4141, 430, 3749, 431, 1619, 975, 4044, 3590, 1944, 4126, 1923, 1706, 432, 976, 977, 978, 4867, 4400, 433, 434, 1606, 2143, 979, 435, 980, 2604, 2895, 981, 436, 3448, 4959, 2188, 437, 438, 1692, 982, 2388, 2433, 2243, 983, 2035, 2120, 4940, 439, 440, 2474, 442, 2052, 4764, 3862, 4055, 4358, 984, 2435, 4589, 2276, 2401, 985, 1664, 443, 2073, 2405, 986, 4309, 4045, 3854, 3682, 2491, 444, 445, 1972, 2688, 4366, 3425, 3231, 3649, 2759, 2724, 3873, 3755, 1216, 3599, 3775, 2754, 2606, 3471, 3234, 2565, 2803, 2562, 2684, 3411, 3405, 2690, 1255, 3694, 446, 3985, 3535, 1306, 4084, 3282, 447, 1353, 2168, 1780, 987, 988, 989, 2126, 448, 449, 2107, 450, 2031, 990, 451, 452, 991, 1485, 453, 992, 1728, 993, 4703, 994, 995, 454, 1696, 996, 2039, 455, 997, 998, 3116, 1869, 456, 4759, 2500, 4798, 2262, 4562, 457, 1386, 999, 458, 4768, 4982, 4778, 2040, 1000, 4981, 3879, 2698, 459, 460, 1001, 461, 1447, 462, 1002, 2042, 2339, 1003, 463, 464, 4425, 1645, 465, 1004, 467, 468, 469, 1231, 1468, 470, 471, 2496, 472, 473, 1005, 474, 475, 2108, 4725, 476, 1273, 1007, 1744, 1488, 1659, 477, 478, 4598, 1604, 4753, 2493, 479, 1008, 1009, 480, 1011, 1012, 1013, 1014, 481, 4313, 482, 483, 1499, 484, 1015, 4761, 2091, 2513, 1016, 4073, 1777, 2172, 485, 2205, 4592, 4545, 486, 1458, 4274, 2122, 4905, 5003, 4599, 4796, 2152, 4539, 4528, 4904, 4842, 4986, 4846, 4650, 4595, 2195, 4681, 2142, 487, 4710, 1775, 4205, 1526, 4586, 4602, 4518, 1697, 1017, 2000, 4692, 4795, 2480, 488, 2335, 489, 4969, 1894, 1882, 1817, 1880, 490, 1018, 3917, 3616, 4311, 1800, 4473, 4085, 4401, 1310, 3783, 3765, 1538, 3870, 491, 1948, 3699, 1735, 3792, 4290, 2074, 492, 2202, 5001, 2136, 493, 2211, 4532, 494, 2421, 495, 4090, 2378, 2104, 2210, 2247, 2478, 2047, 496, 4620, 4978, 4614, 1019, 2012, 1803, 3642, 497, 1322, 1020, 498, 1021, 2235, 2302, 2488, 4665, 4540, 5006, 499, 2049, 4685, 500, 501, 1022, 502, 1333, 503, 1023, 4686, 4804, 504, 4727, 505, 506, 4938, 4805, 2065, 1890, 4891, 1024, 507, 508, 509, 1025, 510, 1026, 3608, 1732, 511, 2397, 1864, 1816, 1531, 512, 513, 2451, 3636, 5012, 4892, 514, 1699, 4593, 1027, 4987, 515, 2495, 4660, 1028, 516, 1029, 2409, 1366, 2112, 2178, 2124, 2376, 5011, 4572, 4957, 4789, 4543, 4664, 4678, 2093, 4746, 2489, 4922, 2145, 1030, 4832, 4950, 1261, 4027, 3478, 3763, 2959, 1293, 2462, 517, 3197, 1595, 3413, 2238, 1031, 2228, 518, 2057, 2305, 2133, 2061, 4526, 4617, 1033, 2429, 2311, 1675, 4785, 1797, 519, 4578, 2271, 2466, 2148, 2420, 520, 4854, 2381, 2315, 2284, 4813, 521, 1034, 522, 523, 1999, 3759, 1215, 4122, 1730, 524, 525, 526, 3966, 4573, 5008, 1035, 527, 4973, 2508, 528, 3911, 529, 3289, 1821, 530, 531, 2426, 1036, 532, 1874, 533, 534, 1037, 535, 1038, 536, 1039, 537, 538, 539, 1040, 3767, 1929, 1042, 3683, 2100, 4853, 2300, 2165, 540, 541, 1043, 4906, 542, 1338, 2292, 2021, 1616, 1901, 1796, 1517, 4331, 4332, 4466, 2719, 3803, 4123, 4233, 1824, 3129, 3087, 3505, 4158, 4254, 1449, 1044, 3720, 4351, 4414, 1673, 3453, 3254, 2501, 1649, 543, 544, 545, 546, 1045, 547, 4240, 3580, 4680, 1046, 548, 2062, 1047, 550, 2598, 551, 552, 553, 3819, 1259, 4062, 1048, 554, 2841, 1049, 1050, 3515, 2219, 1433, 1323, 4301, 555, 556, 1051, 557, 558, 1052, 1053, 3738, 1567, 559, 1054, 1270, 3857, 1055, 2151, 560, 2175, 2089, 1056, 2198, 2193, 1257, 1238, 3662, 561, 2186, 1057, 4637, 562, 1058, 563, 4872, 2097, 564, 1059, 565, 566, 1060, 1061, 2231, 4203, 1899, 3981, 1062, 1303, 4116, 567, 1063, 568, 569, 570, 2367, 1946, 3620, 1064, 1514, 4002, 3679, 3964, 3707, 3666, 1348, 4273, 1804, 4497, 571, 1401, 4438, 1895, 1264, 572, 1912, 573, 3939, 4170, 4056, 1271, 1065, 1521, 1221, 1066, 1451, 1654, 1067, 3934, 4080, 4352, 574, 1700, 3739, 1565, 1419, 1811, 3950, 1690, 1397, 3716, 1569, 1465, 1437, 1674, 4337, 1285, 4268, 1183, 3726, 3881, 4134, 4347, 4012, 3938, 4066, 4198, 4416, 4164, 3630, 4229, 4292, 4193, 4325, 4375, 4371, 4432, 4215, 1753, 3944, 1409, 4195, 1729, 4223, 1540, 4455, 1068, 1069, 4512, 1723, 1070, 3750, 3633, 4070, 4104, 4162, 4235, 1863, 4346, 1881, 1814, 1572, 2418, 575, 4443, 3761, 1346, 1587, 1072, 3592, 576, 1891, 4469, 2430, 1275, 577, 1950, 1963, 4129, 1073, 1296, 1360, 1551, 3733, 4111, 3993, 4108, 3949, 1287, 1713, 1556, 1736, 1995, 1435, 1424, 1830, 1705, 1861, 1197, 1254, 4120, 1545, 4417, 1469, 1292, 2279, 1785, 1236, 4293, 1827, 3839, 3983, 4395, 1957, 2222, 578, 3928, 4295, 3715, 3855, 3609, 1990, 4076, 4175, 3927, 1757, 1650, 4299, 1773, 2004, 1267, 1364, 579, 1462, 1879, 4007, 3729, 3665, 3722, 1691, 1712, 1074, 1624, 1751, 1394, 3924, 3952, 580, 581, 2003, 1343, 2203, 1559, 1250, 1555, 582, 2395, 4114, 1818, 1075, 583, 1076, 1077, 1704, 4448, 584, 4882, 1078, 1079, 1786, 585, 3354, 1832, 586, 3432, 2891, 587, 588, 4583, 2505, 1903, 2077, 4936, 4658, 4830, 2446, 1080, 2278, 1081, 1082, 4459, 1083, 589, 1563, 1084, 2255, 2113, 590, 591, 1085, 592, 2308, 593, 594, 2274, 595, 4931, 2407, 1858, 596, 597, 598, 1453, 2559, 2590, 2738, 4478, 4069, 1809, 1327, 4150, 3260, 3481, 3672, 3625, 2008, 4439, 3852, 3997, 1411, 599, 3847, 4993, 1268, 4050, 3377, 4424, 1496, 4143, 4493, 3492, 1962, 1412, 2455, 600, 2457, 1086, 601, 4017, 4477, 1794, 2483, 2291, 602, 4263, 3072, 2009, 2199, 1754, 1087, 1088, 3888, 603, 604, 4777, 2324, 605, 1368, 3827, 4103, 606, 607, 1089, 2220, 4549, 1090, 1571, 1091, 1438, 608, 1092, 609, 610, 611, 1093, 612, 1094, 3701, 4389, 613, 4897, 1603, 614, 1095, 5000, 615, 616, 2263, 1332, 1715, 4369, 1652, 1096, 617, 1541, 618, 1921, 1733, 1373, 1870, 619, 4218, 1798, 2387, 1097, 1098, 1099, 1100, 620, 1702, 621, 622, 4801, 2398, 2239, 1101, 1667, 1384, 623, 4745, 3700, 1788, 1600, 624, 2098, 625, 4550, 4721, 4960, 4878, 2473, 4792, 4675, 1102, 1423, 626, 2771, 627, 1339, 3875, 628, 629, 3070, 4565, 2118, 4818, 2557, 2795, 2906, 2103, 4869, 2029, 3299, 3118, 4932, 4838, 4901, 4657, 4646, 4875, 4627, 4515, 4876, 4965, 4605, 4576, 2028, 4985, 4850, 1103, 4747, 1614, 1947, 2237, 630, 631, 4618, 4479, 3766, 632, 1104, 1105, 4886, 1106, 2432, 633, 1107, 4530, 634, 2371, 4651, 1108, 4536, 635, 1813, 636, 2431, 4866, 4991, 4814, 4560, 4956, 637, 4555, 1109, 4941, 4577, 2213, 638, 639, 3706, 1110, 640, 1111, 641, 4581, 4893, 4831, 2481, 4644, 4734, 2190, 4524, 4881, 4837, 4888, 4648, 642, 4807, 4896, 4868, 2374, 1112, 4823, 2164, 1113, 3735, 3390, 1694, 3431, 2838, 3483, 3464, 3848, 2558, 3314, 3086, 3029, 2956, 3517, 2651, 2914, 2680, 2632, 3121, 3100, 3528, 3526, 3084, 4220, 3304, 2846, 1186, 3235, 2903, 3559, 2687, 3409, 3237, 2900, 2999, 3349, 3171, 2752, 3262, 3504, 3047, 4376, 3193, 3430, 2525, 2670, 2911, 3508, 2776, 2697, 3200, 2790, 3323, 2543, 2874, 2614, 3904, 3373, 3054, 2617, 4242, 3621, 2708, 4179, 4398, 3959, 4935, 1269, 3095, 1286, 3624, 4481, 1432, 3511, 2735, 4381, 3295, 1585, 2390, 1568, 1114, 1766, 3221, 2643, 2739, 643, 4735, 4760, 1115, 4918, 4688, 3920, 644, 4723, 4949, 4748, 4607, 4719, 1116, 645, 646, 4611, 2353, 4645, 4998, 2307, 647, 1801, 4279, 3762, 1637, 1509, 4843, 4797, 4590, 4995, 4541, 2200, 4580, 4858, 648, 649, 2502, 1117, 4780, 4800, 4551, 4674, 1118, 1119, 2965, 2369, 2695, 3293, 650, 651, 4730, 4862, 4722, 4944, 1120, 652, 1121, 4983, 4784, 4877, 4643, 653, 654, 4909, 1122, 3264, 655, 2076, 4849, 656, 657, 2447, 658, 659, 4035, 2910, 3391, 2808, 3099, 2913, 3676, 2852, 3284, 2731, 1609, 2375, 2201, 3537, 3994, 1319, 4467, 1802, 1227, 1623, 660, 4844, 2086, 4770, 2192, 1123, 661, 2364, 662, 663, 664, 1124, 1125, 665, 2487, 4899, 2138, 1126, 666, 667, 4569, 4554, 4917, 2322, 1127, 1128, 1129, 668, 669, 1130, 670, 1131, 1527, 1132, 671, 1772, 2314, 1133, 1134, 2470, 1135, 672, 2236, 4716, 673, 4600, 2196, 2456, 4606, 4910, 2123, 1136, 1137, 2358, 5005, 2208, 4952, 4945, 1933, 1731, 1793, 675, 676, 3342, 1138, 677, 4597, 4870, 1140, 4990, 4954, 4916, 678, 1141, 4737, 4527, 2253, 4531, 679, 1142, 1143, 680, 4771, 1144, 4638, 681, 4705, 4525, 4522, 4898, 2325, 2415, 5004, 1145, 682, 683, 1146, 684, 685, 2445, 686, 687, 4861, 2157, 688, 3822, 689, 690, 4743, 691, 1147, 1601, 692, 1148, 693, 4537, 4825, 4625, 4621, 3905, 694, 695, 1414, 1149, 696, 2027, 2159, 4756, 4793, 4575, 2160, 4828, 4731, 4718, 4802, 4750, 1150, 2081, 2258, 697, 1795, 1372, 1695, 1866, 1151, 4115, 1719, 2280, 4662, 698, 2176, 2194, 2217, 1920, 699, 700, 701, 4999, 1544, 4739, 702, 703, 4031, 4305, 1636, 1393, 2010, 3810, 4452, 3677, 4227, 1277, 1400, 4402, 4157, 4197, 1337, 1253, 1532, 4028, 3989, 2449, 4715, 704, 2050, 1493, 1854, 1902, 1510, 1152, 4824, 705, 2340, 4182, 706, 2442, 2484, 707, 708, 709, 4667, 1153, 2412, 4476, 2053, 710, 1375, 711, 712, 713, 4829, 4738, 4811, 4570, 4961, 1245, 714, 2045, 4707, 715, 2169, 4713, 1841, 4234, 4924, 1154, 1314, 4096, 2023, 716, 717, 4895, 718, 1155, 719, 720, 2063, 1311, 721, 4642, 722, 4885, 4666, 2249, 4217, 1156, 723, 1157, 1627, 2116, 4566, 2287, 1158, 2330, 4826, 4622, 4740, 724, 4700, 725, 1159, 5013, 4894, 726, 2434, 1953, 1160, 1201, 727, 3787, 2046, 1161, 728, 729, 2485, 2044, 4568, 3747, 730, 731, 2024, 1846, 2507, 2368, 2019, 2333, 3815, 2005, 2266, 1964, 2347, 2385, 732, 2177, 2059, 4958, 1822, 4815, 1262, 2094, 4480, 1537, 1291, 2419, 1318, 2283, 4976, 4294, 2486, 4926, 1582, 2162, 733, 4587, 734, 735, 3439, 2833, 4287, 4509, 4505, 4267, 3697, 3272, 4112, 2967, 3651, 1991, 1805, 1628, 3705, 2479, 736, 1195, 4863, 1163, 3859, 1164, 2394, 1165, 2355, 2351, 4679, 4835, 2259, 4839, 4571, 1166, 4968, 2250, 4912, 2423, 737, 1167, 4989, 4684, 4669, 4552, 4612, 2127, 1745, 1973, 4767, 1168, 2273, 2310, 3807, 4307, 1169, 2303, 1454, or 1781.

[0020] In some aspects, X³, X⁶, and X¹ of SEQ ID NO: 5014 are basic amino acid residues. In some aspects, X³, X⁶, and X⁴ of SEQ ID NO: 5014 are basic amino acid residues. In some aspects, X³, X⁶, X¹, and X⁴ of SEQ ID NO: 5014 are basic amino acid residues.

[0021] In various aspects, the present disclosure provides a viral protein (VP) capsid polypeptide comprising a 581 to 589 region corresponding to residues 581 to 589 of an AAV5 VP1 polypeptide, wherein the 581 to 589 region of the VP capsid polypeptide comprises at least two basic amino acid residues and no more than one acidic amino acid residue.

[0022] In some aspects, the VP capsid polypeptide comprises one or more features selected from the group consisting of: (a) the 581 to 589 region comprises two or more basic amino acid residues, (b) X³, X⁶, X¹, or X⁴ of SEQ ID NO: 5014, or any combination thereof are basic amino acid residues, and (c) the 581 to 589 region comprises no more than one acidic amino acid residue.

[0023] In some aspects, the VP capsid polypeptide comprises two or more of the features. In some aspects, the VP capsid polypeptide comprises three of the features. In some aspects, the acidic amino acid residue is D or E. In some aspects, the basic amino acid residues are K, R, or H.

[0024] In various aspects, the present disclosure provides a viral protein (VP) capsid polypeptide comprising a 581 to 589 region corresponding to residues 581 to 589 of an AAV5 VP1 polypeptide, wherein the 581 to 589 region comprises a sequence having at least 85% sequence identity to any one of SEQ ID NO: 14-SEQ ID NO: 2013.

[0025] In some aspects, the 581 to 589 region comprises a sequence of any one of SEQ ID NO: 14-SEQ ID NO: 2013.

[0026] In various aspects, the present disclosure provides a viral protein (VP) capsid polypeptide comprising a 581 to 589 region corresponding to residues 581 to 589 of an AAV5 VP1 polypeptide, wherein the 581 to 589 region comprises a sequence having at least 85% sequence identity to any one of SEQ ID NO: 2514-SEQ ID NO: 4513.

[0027] In some aspects, the 581 to 589 region comprises a sequence of any one of SEQ ID NO: 2514-SEQ ID NO: 4513. In some aspects, the 581 to 589 region confers increased retina tissue tropism compared to a wild type AAV5 VP capsid polypeptide of SEQ ID NO: 1. In some aspects, the retina tissue tropism is at least 1.5-fold, at least 2-fold, at least 2.5-fold, at least 3-fold, at least 3.5-fold, at least 4-fold, at least 5-fold, at least 10-fold, at least 20-fold, at least 50-fold, at least 75-fold, at least 100-fold, at least 200-fold, or at least 500-fold higher than the wild type AAV5 VP capsid polypeptide of SEQ ID NO: 1.

[0028] In some aspects, the 581 to 589 region further confers increased retinal pigment epithelium tissue tropism compared to a wild type AAV5 VP capsid polypeptide of SEQ ID NO: 1. In some aspects, the 581 to 589 region confers decreased photoreceptor tissue-tropism compared to a wild type AAV5 VP capsid polypeptide of SEQ ID NO: 1. In some aspects, the photoreceptor tissue comprises rod photoreceptor cells, cone photoreceptor cells, or a combination thereof. In some aspects, the VP capsid polypeptide comprises an amino acid sequence at least 70%, at least 80%, at least 85%, at least 90%, at least 95%, at least 97%, at least 98%, at least 98.5%, at least 99%, or at least 99.5% identical to SEQ ID NO: 1.

[0029] In some aspects, the VP capsid polypeptide has a sequence of SEQ ID NO: 2, wherein residues 581 to 589 of SEQ ID NO: 2 (X¹X²X³X⁴X⁵X⁶X⁷X⁸X⁹) correspond to the 581 to 589 region. In some aspects, the VP capsid polypeptide is capable of assembling into a recombinant viral capsid. In some aspects, the VP capsid polypeptide comprises at least one amino acid substitution as compared to each of SEQ ID NO: 3, SEQ ID NO: 4, SEQ ID NO: 5, SEQ ID NO: 6, SEQ ID NO: 7, and SEQ ID NO: 8. In some aspects, the 581 to 589 region comprises a net positive charge at pH 7.4.

[0030] In some aspects, the VP capsid polypeptide further comprises one or more mutations outside of the 581 to 589 region relative to a wild type VP capsid polypeptide of SEQ ID NO: 1. In some aspects, the 581 to 589 region confers on a recombinant viral capsid assembled from the VP capsid polypeptide improved stability compared to a wild type AAV capsid comprising a peptide of SEQ ID NO: 1. In some aspects, the 581 to 589 region confers lower toxicity upon administration to a subject compared to a wild type VP capsid polypeptide of SEQ ID NO: 1. In some aspects, the VP capsid polypeptide further comprises one or more mutations outside of the 581 to 589 region that contributes to reduced production of neutralizing antibodies relative to a wild type VP capsid polypeptide of SEQ ID NO: 1. In some aspects, the VP capsid polypeptide further comprises one or more mutations outside of the 581 to 589 region that improves manufacturability relative to a wild type VP capsid polypeptide of SEQ ID NO: 1.

[0031] In various aspects, the present disclosure provides a recombinant viral adeno-associated virus (rAAV) capsid comprising a VP capsid polypeptide as described herein, wherein the rAAV capsid preferentially targets retina tissue.

[0032] In some aspects, the rAAv further comprises a VP2 polypeptide comprising the 581 to 589 region and a VP3 polypeptide comprising the 581 to 589 region.

[0033] In various aspects, the present disclosure provides a recombinant adeno-associated virus (rAAV), comprising a VP capsid polypeptide as described herein assembled into a recombinant viral capsid and a payload encapsidated by the recombinant viral capsid.

[0034] In some aspects, the rAAV preferentially targets retina tissue. In some aspects, the rAAV further comprises a VP2 polypeptide comprising the 581 to 589 region and a VP3 polypeptide comprising the 581 to 589 region. In some aspects, the payload encodes a therapeutic polynucleotide or a therapeutic peptide. In some aspects, the payload encodes a guide RNA, a tRNA, a suppressor tRNA, a siRNA, a miRNA, an mRNA, a shRNA, a circular RNA, or an antisense oligonucleotide (ASO), a ribozyme, a DNAzyme, an aptamer, or any combination thereof. In some aspects, the guide RNA is a CRISPR/Cas guide RNA or an ADAR guide RNA. In some aspects, the payload encodes a component of a CRISPR/Cas system, an adenosine deaminase acting on RNA (ADAR) enzyme, a transcriptional activator, or a transcriptional repressor.

[0035] In various aspects, the present disclosure provides a pharmaceutical composition comprising a VP capsid polypeptide as described herein, a rAAV capsid as described herein, or a rAAV as described herein.

[0036] In various aspects, the present disclosure provides a method of delivering a payload to a retina tissue of a subject, the method comprising administering a recombinant adeno-associated virus (rAAV) to the subject via intravitreal administration, wherein the rAAV encapsidates the payload, and wherein the rAAV comprises a VP capsid polypeptide comprising a 581 to 589 region comprising at least one substitution relative to SEQ ID NO: 9, and wherein the 581 to 589 region comprises one or more basic amino acid residues.

[0037] In various aspects, the present disclosure provides a method of delivering a payload to a retina tissue of a subject, the method comprising administering a recombinant adeno-associated virus (rAAV) to the subject via intravitreal administration, wherein the rAAV encapsidates the payload, and wherein the rAAV comprises a VP capsid polypeptide comprising a 581 to 589 region corresponding to residues 581 to 589 of an AAV5 VP1 polypeptide, wherein the 581 to 589 region comprises a sequence having at least 85% sequence identity to any one of SEQ ID NO: 14-SEQ ID NO: 2013 or SEQ ID NO: 2514-SEQ ID NO: 4513.

[0038] In various aspects, the present disclosure provides a method of delivering a payload to a retina tissue of a subject, the method comprising administering a recombinant adeno-associated virus (rAAV) to the subject via intravitreal administration, wherein the rAAV encapsidates the payload, and wherein the rAAV comprises a VP capsid polypeptide as described herein.

[0039] In various aspects, the present disclosure provides a method of delivering a payload to a retina tissue of a subject, the method comprising: (i) administering a recombinant adeno-associated virus (rAAV) to the subject, wherein the rAAV encapsidates the payload, and wherein the rAAV comprises a VP capsid polypeptide comprising a 581 to 589 region comprising at least one substitution relative to SEQ ID NO: 9, and wherein the 581 to 589 region comprises one or more basic amino acid residues; and (ii) delivering the payload to the retina tissue.

[0040] In various aspects, the present disclosure provides a method of delivering a payload to a retina tissue of a subject, the method comprising: (i) administering a recombinant adeno-associated virus (rAAV) to the subject, wherein the rAAV encapsidates the payload, and wherein the rAAV comprises a VP capsid polypeptide comprising a 581 to 589 region having at least 85% sequence identity to any one of SEQ ID NO: 14-SEQ ID NO: 2013 or SEQ ID NO: 2514-SEQ ID NO: 4513; and (ii) delivering the payload to the retina tissue.

[0041] In various aspects, the present disclosure provides a method of delivering a payload to a retina tissue of a subject, the method comprising: (i) administering a recombinant adeno-associated virus (rAAV) to the subject, wherein the rAAV encapsidates the payload, and wherein the rAAV comprises a VP capsid polypeptide as described herein; and (ii) delivering the payload to the retina tissue.

[0042] In some aspects, the method comprises administering the rAAV via intravitreal administration. In some aspects, the method comprises administering the rAAV via subretinal injection, topical mucosal administration, or systemic administration. In some aspects, the method further comprises expressing a therapeutic polypeptide or a therapeutic polynucleotide encoded by the payload. In some aspects, the method further comprises producing a therapeutic effect upon expression of the payload. In some aspects, the therapeutic effect is produced upon administration of from 1×10⁵ to 5×10¹⁴ rAAVs. In some aspects, the method comprises administering an amount of the rAAV sufficient to produce the therapeutic effect without producing a toxicity in the subject.

[0043] In various aspects, the present disclosure provides a method of treating a condition in a subject, the method comprising administering a recombinant adeno-associated virus (rAAV) to the subject via intravitreal administration, wherein the rAAV encapsidates a payload, and wherein the rAAV comprises a VP capsid polypeptide comprising a 581 to 589 region comprising at least one substitution relative to SEQ ID NO: 9, and wherein the 581 to 589 region comprises one or more basic amino acid residues.

[0044] In various aspects, the present disclosure provides a method of treating a condition in a subject, the method comprising administering a recombinant adeno-associated virus (rAAV) to the subject via intravitreal administration, wherein the rAAV encapsidates a payload, and wherein the rAAV comprises a VP capsid polypeptide comprising a 581 to 589 region corresponding to residues 581 to 589 of an AAV5 VP1 polypeptide having at least 85% sequence identity to any one of SEQ ID NO: 14-SEQ ID NO: 2013 or SEQ ID NO: 2514-SEQ ID NO: 4513.

[0045] In various aspects, the present disclosure provides a method of treating a condition in a subject, the method comprising administering a recombinant adeno-associated virus (rAAV) to the subject via intravitreal administration, wherein the rAAV encapsidates a payload, and wherein the rAAV comprises a VP capsid polypeptide as described herein.

[0046] In some aspects, the method further comprises expressing the payload in a retina tissue of the subject. In some aspects, the method further comprises producing a therapeutic effect in the subject.

[0047] In various aspects, the present disclosure provides a method of treating a condition in a subject, the method comprising: (i) administering a recombinant adeno-associated virus (rAAV) to the subject, wherein the rAAV encapsidates a payload, and wherein the rAAV comprises a VP capsid polypeptide comprising a 581 to 589 region comprising at least one substitution relative to SEQ ID NO: 9, and wherein the 581 to 589 region comprises one or more basic amino acid residues; and (ii) expressing the payload in a retina tissue of the subject, thereby treating the condition in the subject.

[0048] In various aspects, the present disclosure provides a method of treating a condition in a subject, the method comprising: (i) administering a recombinant adeno-associated virus (rAAV) to the subject, wherein the rAAV encapsidates a payload, and wherein the rAAV comprises a VP capsid polypeptide comprising a 581 to 589 region corresponding to residues 581 to 589 of an AAV5 VP1 polypeptide, wherein the 581 to 589 region comprises a sequence having at least 85% sequence identity to any one of SEQ ID NO: 14-SEQ ID NO: 2013 or SEQ ID NO: 2514-SEQ ID NO: 4513; and (ii) expressing the payload in a retina tissue of the subject, thereby treating the condition in the subject.

[0049] In various aspects, the present disclosure provides a method of treating a condition in a subject, the method comprising: (i) administering a recombinant adeno-associated virus (rAAV) to the subject, wherein the rAAV encapsidates a payload, and wherein the rAAV comprises a VP capsid polypeptide as described herein; and (ii) expressing the payload in a retina tissue of the subject, thereby treating the condition in the subject.

[0050] In various aspects, the present disclosure provides a method of treating a condition in a subject, the method comprising: (i) administering a recombinant adeno-associated virus (rAAV) to the subject, wherein the rAAV encapsidates a payload, and wherein the rAAV comprises a VP capsid polypeptide as described herein; (ii) delivering the payload to a retina tissue of the subject; and (iii) producing a therapeutic effect in the retina tissue, thereby treating the condition.

[0051] In some aspects, the method comprises administering the rAAV via intravitreal administration. In some aspects, the method comprises administering the rAAV via subretinal injection, topical mucosal administration, or systemic administration. In some aspects, the condition is an ocular condition. In some aspects, the ocular condition is achromatopsia, macular degeneration, cataracts, choroideremia, glaucoma, optical neuropathy, Marfan syndrome, myopia, polypoidal choroidal vasculopathy, retinitis pigmentosa, Stargardt disease, Usher syndrome, Leber congenital amaurosis, Leber hereditary optical neuropathy, Uveal melanoma, or X-linked retinoschisis. In some aspects, the ocular condition is Stargardt disease.

[0052] In some aspects, the method further comprises delivering the rAAV to a retina tissue with higher tissue tropism than a wild type AAV5 capsid comprising a peptide of SEQ ID NO: 1. In some aspects, the method further comprises delivering the rAAV to a retina tissue with higher tissue tropism than for photoreceptor tissue. In some aspects, the method comprises delivering the rAAV to a retina tissue with at least 2.5-fold, at least 3-fold, at least 3.5-fold, at least 4-fold, at least 5-fold, at least 10-fold, at least 20-fold, at least 50-fold, at least 75-fold, at least 100-fold, at least 200-fold, at least 500-fold higher, or at least 1000-fold higher tissue tropism than a wild type AAV5 capsid comprising a peptide of SEQ ID NO: 1. In some aspects, the method comprises administering from 1×10⁵ to 5×10¹⁴ rAAVs.

[0053] In some aspects, the payload encodes a therapeutic protein, therapeutic polynucleotide, a guide RNA, a tRNA, a suppressor tRNA, a siRNA, a miRNA, an mRNA, a shRNA, a circular RNA, an antisense oligonucleotide (ASO), a ribozyme, a DNAzyme, an aptamer, or any combination thereof. In some aspects, the guide RNA is a CRISPR/Cas guide RNA or an ADAR guide RNA. In some aspects, the therapeutic protein is selected from the group consisting of CNGB3, NOS2A, CFH, CF, C2, C3, CFB, HTRA1/LOC, MMP-9, TIMP-3, SLC16A8, GEMIN4, CYP51A1, RIC1, TAPT1, TAF1A, WDR87, APE1, MIP, Cx50, GJA3, GJA8, CRYAA, CRYBB2, PRX, POLR3B, XRCC1, ZNF350, EPHA2, REP1, CALM2, MPP-7, Optineurin, LOX1, CYP1B1, CAV1/2, MYOC, PITX2, FOXC1, PAX6, LTBP2, Complex I, ND, OPA1, RPE65, FBN1, TGFBR2, MTHFR, MTR, MTRR, HGF, C-MET, UMODL1, MMP-1/2, CBS, IGF-1, UHRF1BP1L, PTPRR, PPFIA2, P4HA2, SERPING1, PEDF, ARMS2-HTRA1, FGD6, ABCG1, LOC387715, CETP, NRL, RDH12, PRPH2 (RDS), RHO, RPGR, SNRNP200, NR2E3, IMPDH1, CRX, HK1, IMPDH2, PRPF3, AGBL5, ABCA1, ABCA4, CRB1, USH2A, NRP1, ND4, RLBP1, PTEN, BAP1, GNAQ, GNA11, DDEF1, SF3B1, EIF1AX, CDKN2A, p14ARF, HERC2/OCA2, VEGF, and RS1. In some aspects, the therapeutic polynucleotide targets an mRNA encoding a protein selected from the group consisting of CNGB3, NOS2A, CFH, CF, C2, C3, CFB, HTRA1/LOC, MMP-9, TIMP-3, SLC16A8, GEMIN4, CYP51A1, RIC1, TAPT1, TAF1A, WDR87, APE1, MIP, Cx50, GJA3, GJA8, CRYAA, CRYBB2, PRX, POLR3B, XRCC1, ZNF350, EPHA2, REP1, CALM2, MPP-7, Optineurin, LOX1, CYP1B1, CAV1/2, MYOC, PITX2, FOXC1, PAX6, LTBP2, Complex I, ND, OPA1, RPE65, FBN1, TGFBR2, MTHFR, MTR, MTRR, HGF, C-MET, UMODL1, MMP-1/2, CBS, IGF-1, UHRF1BP1L, PTPRR, PPFIA2, P4HA2, SERPING1, PEDF, ARMS2-HTRA1, FGD6, ABCG1, LOC387715, CETP, NRL, RDH12, PRPH2 (RDS), RHO, RPGR, SNRNP200, NR2E3, IMPDH1, CRX, HK1, IMPDH2, PRPF3, AGBL5, ABCA1, ABCA4, CRB1, USH2A, NRP1, ND4, RLBP1, PTEN, BAP1, GNAQ, GNA11, DDEF1, SF3B1, EIF1AX, CDKN2A, p14ARF, HERC2/OCA2, VEGF, or RS1. In some aspects, the payload encodes a therapeutic polynucleotide targeting ABCA1, ABCA4, or CRB1 or a transgene encoding ABCA1, ABCA4, or CRB1. In some aspects, the payload encodes a component of a CRISPR/Cas system, an adenosine deaminase acting on RNA (ADAR) enzyme, a transcriptional activator, or a transcriptional repressor. In some aspects, the component of the CRISPR/Cas system comprises a Cas3, a Cas8, a Cas10, a Cas9, a Cas4, a Cas12, a Cas13, a guide RNA, or a combination thereof. In some aspects, the ADAR enzyme is ADAR1 or ADAR2. In some aspects, the transcriptional activator is VP64. In some aspects, the transcriptional repressor is KRAB.

[0054] In some aspects, the method further comprises expressing a therapeutic polypeptide or a therapeutic polynucleotide encoded by the payload. In some aspects, the method comprises expressing the therapeutic polypeptide or the therapeutic polynucleotide at a higher level in a retina tissue compared to a wild type AAV5 capsid comprising a peptide of SEQ ID NO: 1. In some aspects, the method comprises expressing the therapeutic polypeptide or the therapeutic polynucleotide in a retina tissue at a level that is at least 3-fold, at least 3.5-fold, at least 4-fold, at least 5-fold, at least 10-fold, at least 20-fold, at least 50-fold, at least 75-fold, at least 100-fold, at least 200-fold, at least 500-fold higher, or at least 1000-fold higher compared to the wild type AAV5 capsid. In some aspects, the method comprises producing a toxicity in the subject that is lower than a toxicity produced upon administration of a comparable number of wild type AAV5 capsids comprising a VP capsid polypeptide of SEQ ID NO: 1. In some aspects, the method comprises producing a toxicity in the subject that is lower than a toxicity produced upon administration of a number of wild type AAV5 capsids comprising a VP capsid polypeptide of SEQ ID NO: 1 sufficient to deliver a comparable number of payloads to a retina tissue. In some aspects, the method comprises producing a concentration of neutralizing antibodies in the subject that is lower than a concentration of neutralizing antibodies produced upon administration of a comparable number of wild type AAV5 capsids comprising a VP capsid polypeptide of SEQ ID NO: 1. In some aspects, the method comprises producing a concentration of neutralizing antibodies in the subject that is lower than a concentration of neutralizing antibodies produced upon administration of a comparable number of wild type AAV2 capsids. In some aspects, the method comprises producing a concentration of neutralizing antibodies in the subject that is lower than a concentration of neutralizing antibodies produced upon administration of a comparable number of wild type AAV8 capsids. In some aspects, the method comprises producing a concentration of neutralizing antibodies in the subject that is lower than a concentration of neutralizing antibodies produced upon administration of a comparable number of wild type AAV9 capsids. In some aspects, the method comprises producing a concentration of neutralizing antibodies in the subject that is lower than a concentration of neutralizing antibodies produced upon administration of a number of wild type AAV5 capsids comprising a VP capsid polypeptide of SEQ ID NO: 1 sufficient to deliver a comparable number of payloads to a retina tissue.

[0055] In various aspects, the present disclosure provides a rAAV capsid as described herein, a rAAV as described herein, or a pharmaceutical composition as described herein for use as a medicament.

[0056] In various aspects, the present disclosure provides a rAAV capsid as described herein, a rAAV as described herein, or a pharmaceutical composition as described herein for use in a method of treating an ocular condition.

[0057] In some aspects, the ocular condition is achromatopsia, macular degeneration, cataracts, choroideremia, glaucoma, optical neuropathy, Marfan syndrome, myopia, polypoidal choroidal vasculopathy, retinitis pigmentosa, Stargardt disease, Usher syndrome, Leber congenital amaurosis, Leber hereditary optical neuropathy, Uveal melanoma, or X-linked retinoschisis. In some aspects, the ocular condition is Stargardt disease.

[0058] In various aspects, the present disclosure provides a viral protein (VP) capsid polypeptide comprising a 581 to 589 region corresponding to residues 581 to 589 of an AAV5 VP1 polypeptide, wherein the 581 to 589 region comprises a sequence having at least 85% sequence identity to any one of SEQ ID NO: 2014-SEQ ID NO: 2513.

[0059] In some aspects, the 581 to 589 region comprises a sequence of any one of SEQ ID NO: 2014-SEQ ID NO: 2513.

[0060] In various aspects, the present disclosure provides a viral protein (VP) capsid polypeptide comprising a 581 to 589 region corresponding to residues 581 to 589 of an AAV5 VP1 polypeptide, wherein the 581 to 589 region comprises a sequence having at least 85% sequence identity to any one of SEQ ID NO: 4514-SEQ ID NO: 5013.

[0061] In some aspects, the 581 to 589 region comprises a sequence of any one of SEQ ID NO: 4514-SEQ ID NO: 5013.

[0062] In various aspects, the present disclosure provides a recombinant viral adeno-associated virus (rAAV) capsid comprising a VP capsid polypeptide as described herein, wherein the rAAV capsid preferentially targets retinal pigment epithelium tissue.

[0063] In various aspects, the present disclosure provides a recombinant viral adeno-associated virus (rAAV) capsid comprising a VP capsid polypeptide as described herein, wherein the rAAV capsid preferentially targets choroid tissue.

[0064] In various aspects, the present disclosure provides a method of delivering a payload to a retinal pigment epithelium tissue of a subject, the method comprising administering a recombinant adeno-associated virus (rAAV) to the subject via intravitreal administration, wherein the rAAV encapsidates the payload, and wherein the rAAV comprises a VP capsid polypeptide comprising a 581 to 589 region corresponding to residues 581 to 589 of an AAV5 VP1 polypeptide having at least 85% sequence identity to any one of SEQ ID NO: 2014-SEQ ID NO: 2513 or SEQ ID NO: 4514-SEQ ID NO: 5013.

[0065] In various aspects, the present disclosure provides a method of delivering a payload to a retinal pigment epithelium tissue of a subject, the method comprising administering a recombinant adeno-associated virus (rAAV) to the subject via intravitreal administration, wherein the rAAV encapsidates the payload, and wherein the rAAV comprises a VP capsid polypeptide comprising a 581 to 589 region corresponding to residues 581 to 589 of an AAV5 VP1 polypeptide having at least 85% sequence identity to any one of SEQ ID NO: 2014-SEQ ID NO: 2513 or SEQ ID NO: 4514-SEQ ID NO: 5013.

[0066] In various aspects, the present disclosure provides a method of delivering a payload to a choroid tissue of a subject, the method comprising: (i) administering a recombinant adeno-associated virus (rAAV) to the subject, wherein the rAAV encapsidates the payload, and wherein the rAAV comprises a VP capsid polypeptide comprising a 581 to 589 region having at least 85% sequence identity to any one of SEQ ID NO: 2014-SEQ ID NO: 2513 or SEQ ID NO: 4514-SEQ ID NO: 5013; and (ii) delivering the payload to the choroid tissue.

[0067] In various aspects, the present disclosure provides a method of delivering a payload to a retinal pigment epithelium tissue of a subject, the method comprising: (i) administering a recombinant adeno-associated virus (rAAV) to the subject, wherein the rAAV encapsidates the payload, and wherein the rAAV comprises a VP capsid polypeptide comprising a 581 to 589 region having at least 85% sequence identity to any one of SEQ ID NO: 2014-SEQ ID NO: 2513 or SEQ ID NO: 4514-SEQ ID NO: 5013; and (ii) delivering the payload to the retinal pigment epithelium tissue.

[0068] In various aspects, the present disclosure provides a method of treating a condition in a subject, the method comprising administering a recombinant adeno-associated virus (rAAV) to the subject via intravitreal administration, wherein the rAAV encapsidates a payload, and wherein the rAAV comprises a VP capsid polypeptide comprising a 581 to 589 region corresponding to residues 581 to 589 of an AAV5 VP1 polypeptide having at least 85% sequence identity to any one of SEQ ID NO: 2014-SEQ ID NO: 2513 or SEQ ID NO: 4514-SEQ ID NO: 5013.

[0069] In various aspects, the present disclosure provides a method of treating a condition in a subject, the method comprising: (i) administering a recombinant adeno-associated virus (rAAV) to the subject, wherein the rAAV encapsidates a payload, and wherein the rAAV comprises a VP capsid polypeptide comprising a 581 to 589 region corresponding to residues 581 to 589 of an AAV5 VP1 polypeptide, wherein the 581 to 589 region comprises a sequence having at least 85% sequence identity to any one of SEQ ID NO: 2014-SEQ ID NO: 2513 or SEQ ID NO: 4514-SEQ ID NO: 5013; and (ii) expressing the payload in a retinal pigment epithelium tissue of the subject, thereby treating the condition in the subject.

### INCORPORATION BY REFERENCE

[0070] All references cited herein are incorporated by reference to the same extent as if each individual publication, database entry (e.g., Genbank sequences or GeneID entries), patent application, or patent, was specifically and individually indicated incorporated by reference in its entirety, for all purposes. This statement of incorporation by reference is intended by Applicants, pursuant to 37 C.F.R. § 1.57(b)(1), to relate to each and every individual publication, database entry (e.g., Genbank sequences or GeneID entries), patent application, or patent, each of which is clearly identified in compliance with 37 C.F.R. § 1.57(b)(2), even if such citation is not immediately adjacent to a dedicated statement of incorporation by reference. The inclusion of dedicated statements of incorporation by reference, if any, within the specification does not in any way weaken this general statement of incorporation by reference. Citation of the references herein is not intended as an admission that the reference is pertinent prior art, nor does it constitute any admission as to the contents or date of these publications or documents.

### BRIEF DESCRIPTION OF THE DRAWINGS

[0071] These and other features, aspects, and advantages of the present invention will become better understood with regard to the following description, and accompanying drawings where:

[0072] FIG. 1 is a schematic of the high throughput AAV capsid engineering system for identification of tissue-tropic sequences for intravitreal administration. A capsid library, selected for the ability to assemble into viral capsids, is administered to a non-human primate (NHP) by intravitreal administration. Tissues, including eye tissues such as retina, optic nerve, choroid, aqueous humor, and vitreous humor, are recovered, and the capsids accumulated in each tissue are sequenced. The resulting sequencing data are fed into a machine learning-powered bioinformatics pipeline to identify viral capsid polypeptide sequences and biophysical properties that promote tissue-specific transduction/infection.

[0073] FIG. 2A provides a side view (top panel) and top view (bottom panel) of key residues of known AAV capsids that have been shown to interact with target cells.

[0074] FIG. 2B illustrates salient features of the AAV capsid library described in EXAMPLE 1, showing the region of introduced diversity, with residue numbering corresponding to the numbering of amino acids in AAV5 VP1.

[0075] FIG. 3 is a bar graph showing viral genomes per milligram of tissue recovered from various eye tissues following NHP capsid library screening performed as illustrated in FIG. 1. Screening was performed independently in two non-human primates (“NHP1” and “NHP2”).

[0076] FIG. 4 is a bar graph showing the number of unique variant capsid polypeptide sequences (“#of varAA”) identified within various tissues from two NHPs (“NHP #1” and “NHP #2”) administered a recombinant AAV library via intravitreal injection.

[0077] FIG. 5A-FIG. 5D are sequence logo plots depicting relative amino acid enrichment and depletion at each amino acid position of the 581 to 589 region in the retina from two NHPs administered a recombinant AAV library via intravitreal injection. FIG. 5A illustrates enrichment in retina versus other remaining eye tissues (“other”) in example NHP1. FIG. 5B illustrates enrichment in retina versus other remaining eye tissues (“other”) in a second example NHP2. FIG. 5C illustrates enrichment in retina versus vitreous/aqueous humor (“humor”) in a first NHP. FIG. 5D illustrates enrichment in retina versus vitreous/aqueous humor (“humor”) in a second NHP.

[0078] FIG. 6A and FIG. 6B are heatmaps showing relative amino acid enrichment in retina at each amino acid position of the 581 to 589 region (corresponding to positions 581-589 in the VP1 sequence) for a first (FIG. 6A) and second (FIG. 6B) NHP, administered a recombinant AAV library via intravitreal injection. The enrichment shown is relative to “ST2”, the diversity of the assembled capsid library pre-infusion.

[0079] FIG. 7 is a bar graph showing numbers of AAV capsid polypeptide variants observed in a primary screen of an engineered AAV capsid library. Counts are provided for the total number of variants found in either retina or RPE tissue (“total”), the number of variants found in only that tissue (“tissue_unique”), the number of tissue-unique variants found in more than one non-human primate (“multiple_nhps”), and the number of tissue-unique variants found in more than one replicate (“multiple_reps,” includes variants found in multiple NHPs).

[0080] FIG. 8 is a violin plot comparing the predictive probability (“retina_score”) of having retina-specific tropism for retina tissue-unique variants separated based on numbers of observations, either a single observation (“n”) or multiple observations (“y”), within non-human primates (“multiple_nhps”) or within all replicates (“multiple_reps”).

[0081] FIG. 9 is a box and whisker plot showing the predictive probability (“Average ML Score”) of having retina-specific tropism for all retina tissue-unique variants identified from the primary screen (“observed”) or generated through machine learning models (“synthetic”). Subsets of observed retina variants found in multiple NHPs (“Multiple NHPs”) or multiple replicates (“Multiple Replicates”) are noted, along with synthetic variants generated using three distinct modeling strategies (“Input optimization”, “Sample PWM”, and “Sample uniform”).

[0082] FIG. 10 is plot showing the predictive probability (“Average ML Score”) of having retina-specific tropism for retina tissue-unique variants selected for inclusion in the secondary screen that were identified from the primary screen (“observed”) or through machine learning models (“synthetic”).

### DETAILED DESCRIPTION OF THE INVENTION

[0083] Unless described otherwise, all technical and scientific terms used herein have the meaning commonly understood by one of ordinary skill in the art to which the invention pertains.

[0084] Unless otherwise stated, whenever a range is recited, the range is inclusive of the recited endpoints. For example, the region from amino acid residue 581 to amino acid residue 589 of SEQ ID NO: 1 includes amino acid residues 581 and 589.

[0085] “Homology” or “identity” or “similarity” can refer to sequence similarity between two peptides or between two nucleic acid molecules. Homology can be determined by comparing a position in each sequence which can be aligned for purposes of comparison. When a position in the compared sequence can be occupied by the same base or amino acid, then the molecules can be homologous at that position. A degree of homology between sequences can be a function of the number of matching or homologous positions shared by the sequences. An “unrelated” or “non-homologous” sequence shares less than 40% identity, or alternatively less than 25% identity, with one of the sequences of the disclosure. Sequence homology can refer to a % identity of a sequence to a reference sequence. As a practical matter, whether any particular sequence can be at least 50%, 60%, 70%, 77.7%, 80%, 88.8%, 85%, 90%, 92%, 95%, 96%, 97%, 98% or 99% identical to any sequence described herein (which can correspond with a particular nucleic acid sequence described herein), such particular polypeptide sequence can be determined conventionally using known computer programs such the Bestfit program (Wisconsin Sequence Analysis Package, Version 8 for Unix, Genetics Computer Group, University Research Park, 575 Science Drive, Madison, Wis. 53711). When using Bestfit or any other sequence alignment program to determine whether a particular sequence is, for instance, 95% identical to a reference sequence, the parameters can be set such that the percentage of identity can be calculated over the full length of the reference sequence and that gaps in sequence homology of up to 5% of the total reference sequence can be allowed. The term percent “identity” or percent “homology,” in the context of two or more nucleic acid or polypeptide sequences, refer to two or more sequences or subsequences that have a specified percentage of nucleotides or amino acid residues that are the same, when compared and aligned for maximum correspondence, as measured using one of the sequence comparison algorithms described below (e.g., BLASTP and BLASTN or other algorithms available to persons of skill) or by visual inspection. Depending on the application, the percent “identity” can exist over a region of the sequence being compared, e.g., over a functional domain, or, alternatively, exist over the full length of the two sequences to be compared. For sequence comparison, typically one sequence acts as a reference sequence to which test sequences are compared. When using a sequence comparison algorithm, test and reference sequences are input into a computer, subsequence coordinates are designated, if necessary, and sequence algorithm program parameters are designated. The sequence comparison algorithm then calculates the percent sequence identity for the test sequence(s) relative to the reference sequence, based on the designated program parameters. For purposes herein, determination of percent identity and sequence similarity is performed using the BLAST algorithm, which is described in Altschul et al., J. Mol. Biol. 215:403-410 (1990). Software for performing BLAST analyses is publicly available through the National Center for Biotechnology Information (www.ncbi.nlm.nih.gov/). For example, where an amino acid sequence consisting of 9 residues is compared with another 9 residue amino acid sequence, if 8 residues match then the sequences have 88.8% identity, if 7 residues match then the sequences have 77.7% identity.

[0086] In some cases, the identity between a reference sequence (query sequence, e.g., a sequence of the disclosure) and a subject sequence, also referred to as a global sequence alignment, can be determined using the FASTDB computer program. In some embodiments, parameters for a particular embodiment in which identity can be narrowly construed, used in a FASTDB amino acid alignment, can include: Scoring Scheme=PAM (Percent Accepted Mutations) 0, k-tuple=2, Mismatch Penalty=1, Joining Penalty=20, Randomization Group Length=0, Cutoff Score=1, Window Size=sequence length, Gap Penalty=5, Gap Size Penalty=0.05, Window Size=500 or the length of the subject sequence, whichever can be shorter. According to this embodiment, if the subject sequence can be shorter than the query sequence due to N- or C-terminal deletions, not because of internal deletions, a manual correction can be made to the results to take into consideration the fact that the FASTDB program does not account for N- and C-terminal truncations of the subject sequence when calculating global percent identity. For subject sequences truncated at the N- and C-termini, relative to the query sequence, the percent identity can be corrected by calculating the number of residues of the query sequence that can be lateral to the N- and C-terminal of the subject sequence, which can be not matched/aligned with a corresponding subject residue, as a percent of the total bases of the query sequence. A determination of whether a residue can be matched/aligned can be determined by results of the FASTDB sequence alignment. This percentage can be then subtracted from the percent identity, calculated by the FASTDB program using the specified parameters, to arrive at a final percent identity score. This final percent identity score can be used for the purposes of this embodiment. In some cases, only residues to the N- and C-termini of the subject sequence, which can be not matched/aligned with the query sequence, can be considered for the purposes of manually adjusting the percent identity score. That is, only query residue positions outside the farthest N- and C-terminal residues of the subject sequence can be considered for this manual correction. For example, a 90-residue subject sequence can be aligned with a 100-residue query sequence to determine percent identity. The deletion occurs at the N-terminus of the subject sequence, and therefore, the FASTDB alignment does not show a matching/alignment of the first 10 residues at the N-terminus. The 10 unpaired residues represent 10% of the sequence (number of residues at the N- and C-termini not matched/total number of residues in the query sequence) so 10% can be subtracted from the percent identity score calculated by the FASTDB program. If the remaining 90 residues were perfectly matched, the final percent identity can be 90%. In another example, a 90-residue subject sequence can be compared with a 100-residue query sequence. This time the deletions can be internal deletions, so there can be no residues at the N- or C-termini of the subject sequence which can be not matched/aligned with the query. In this case, the percent identity calculated by FASTDB can be not manually corrected. Once again, only residue positions outside the N- and C-terminal ends of the subject sequence, as displayed in the FASTDB alignment, which can be not matched/aligned with the query sequence can be manually corrected for.

[0087] Peptide sequences for use in the present invention may comprises one or more substitutions, i.e. amino acid substitutions. The substitutions may be conservative amino acid substitutions. Therefore, peptide sequences for use in the present invention may include one or more conservative amino acid substitutions, such that the resulting sequence has a similar amino acid sequence and/or retains the same function. The skilled person is aware that various amino acids have similar biochemical properties and thus are “conservative”. One or more such amino acids of a protein, polypeptide or peptide can often be substituted by one or more other such amino acids without eliminating a desired activity of that protein, polypeptide or peptide. Thus, the amino acids glycine, alanine, valine, leucine and isoleucine can often be substituted for one another (amino acids having aliphatic side chains). Of these possible substitutions it is preferred that glycine and alanine are used to substitute for one another (since they have relatively short side chains) and that valine, leucine and isoleucine are used to substitute for one another (since they have larger aliphatic side chains which are hydrophobic). Other amino acids which can often be substituted for one another include: phenylalanine, tyrosine and tryptophan (amino acids having aromatic side chains); lysine, arginine and histidine (amino acids having basic side chains); aspartate and glutamate (amino acids having acidic side chains); asparagine and glutamine (amino acids having amide side chains); and cysteine and methionine (amino acids having sulfur containing side chains). It should be appreciated that amino acid substitutions within the scope of the present invention can be made using naturally occurring or non-naturally occurring amino acids. For example, the methyl group on an alanine may be replaced with an ethyl group, and/or minor changes may be made to the peptide backbone. Whether or not natural or synthetic amino acids are used, it is preferred that only L-amino acids are present. Substitutions of this nature are often referred to as “conservative substitutions”.

[0088] As used herein, “tropism” of a rAAV for a tissue may refer to the ability of a given rAAV to preferentially infect a given cell type or tissue. A degree of tropism may be determined by a ratio of an infection rate in a targeted tissue to an infection rate in a different, non-targeted tissue. As used herein, increased tropism for a given cell type or tissue, such as increased tropism conferred by a 581 to 589 region, is determined relative to a wild type AAV5 capsid. As used herein, “detargeting” of a rAAV to a tissue may refer to the ability of a given rAAV to avoid infecting a detargeted tissue or cell type while infecting one or more other tissues or cell types. A degree of detargeting may be determined by a ratio of an infection rate in a detargeted tissue to an infection rate of a different, non-detargeted tissue. As used herein, increased detargeting for a given cell type or tissue, such as increased detargeting conferred by a 581 to 589 region, is determined relative to a wild type AAV5 capsid.

[0089] As used herein, “tissue tropism” refers to a preference of a virus having an engineered VP capsid polypeptide of the present disclosure to infect a given tissue or be enriched in or accumulate in a given tissue. A “tissue-tropic” rAAV may specifically target or infect a first tissue or set of tissues and may not target or infect a second tissue or set of tissues. For example, a “retinal tissue-tropic” rAAV may specifically target or infect retinal tissue and may not target or infect vitreous humor, aqueous humor, or other tissues. A “tissue-detargeted” rAAV may specifically avoid targeting or avoid infection of the detargeted tissue or set of tissues while infecting a second tissue or set of tissues. For example, a “liver-detargeted” rAAV may not target or infect liver tissue but may infect one or more other tissues, such as ocular, nervous, muscle, skin, bone, and/or other tissue. In another example, a “photoreceptor-detargeted” rAAV may not target or infect photoreceptor cells but may infect one or more other cell or tissue types, such as aqueous humor, retina, retinal pigment epithelium, optic nerve, vitreous humor, and/or other tissue or cells. In another example, a “choroid-detargeted” rAAV may not target or infect choroid tissue but may infect one or more other tissue or cell types, such as aqueous humor, retina, retinal pigment epithelium, optic nerve, vitreous humor, and/or other tissue or cells. Tissue tropism or tissue detargeting, when used as a relative term and depending on the context in which it is described herein, refers to an increase or decrease in tissue tropism of a given rAAV virion having a first capsid polypeptide in a first tissue as compared to a second tissue and/or refers to an increase or decrease in tissue tropism of a given rAAV virion having a first capsid polypeptide to an rAAV virion having a second capsid polypeptide. In some embodiments, the first tissue can be a group of tissues. In some embodiments, the second tissue can be a group of tissues. For example, the first tissue may be retinal tissue and the second tissue may be a different eye tissue (e.g., aqueous humor, choroid, optic nerve, vitreous humor, or remaining eye tissue). In another example, tissue tropism can refer to cellular homing, such as targeting a retinal pigment epithelial cell, a photoreceptor cell (e.g., rod cells, cone cells, or a combination thereof), or both.

[0090] In some embodiments, the rAAV virions of the present disclosure may also be referred to as preferentially targeting a given tissue or having tissue selectivity for a given tissue. For example, an rAAV virion that preferentially targets retinal tissue may specifically target or infect retinal tissue and may not target or infect vitreous humor, aqueous humor, or other tissues. As another example, an rAAV virion that has retinal tissue selectivity may specifically target or infect retinal tissue and may not target or infect vitreous humor, aqueous humor, or other tissues.

[0091] For simplicity throughout this disclosure, viral capsid protein is generally referred to as “VP.” Viral capsid protein is referred to as VP1 when referencing AAV5 VP1 positional notation. In all cases, viral capsid sequences and mutations disclosed herein should be understood as pertaining to all isoforms of the capsid protein (VP1, VP2, and VP3), as a mixture of these isoforms assemble to form virions. The positional amino acid residue designations “581 to 589” are relative to the translational start of the VP1 polypeptide and should be adjusted accordingly to the relative start sites of VP2 and VP3. It should be understood that the present disclosure, when describing any particular VP1 sequence with mutations at particular amino acid residue positions, necessarily also encompasses corresponding mutations in VP2 and VP3. For example, any consensus sequence or specific sequence of a VP1 capsid protein having one or more mutations in the 581 to 589 region, corresponding to amino acid residues 581 to 589 of VP1, also encompasses VP2 and VP3 capsid proteins having said one or more mutations in an amino acid residue region in VP2 and VP3 corresponding to the amino acid residues of the VP1 581 to 589 region. For example, the amino acid residues of the 581 to 589 region of VP1 (SEQ ID NO: 1; MSFVDHPPDWLEEVGEGLREFLGLEAGPPKPKPNQQHQDQARGLVLPGYNYLGPGNG LDRGEPVNRADEVAREHDISYNEQLEAGDNPYLKYNHADAEFQEKLADDTSFGGNLG KAVFQAKKRVLEPFGLVEEGAKTAPTGKRIDDHFPKRKKARTEEDSKPSTSSDAEAGPS GSQQLQIPAQPASSLGADTMSAGGGGPLGDNNQGADGVGNASGDWHCDSTWMGDRV VTKSTRTWVLPSYNNHQYREIKSGSVDGSNANAYFGYSTPWGYFDFNRFHSHWSPRD WQRLINNYWGFRPRSLRVKIFNIQVKEVTVQDSTTTIANNLTSTVQVFTDDDYQLPYVV GNGTEGCLPAFPPQVFTLPQYGYATLNRDNTENPTERSSFFCLEYFPSKMLRTGNNFEFT YNFEEVPFHSSFAPSQNLFKLANPLVDQYLYRFVSTNNTGGVQFNKNLAGRYANTYKN WFPGPMGRTQGWNLGSGVNRASVSAFATTNRMELEGASYQVPPQPNGMTNNLQGSN TYALENTMIFNSQPANPGTTATYLEGNMLITSESETQPVNRVAYNVGGQMATNNQSST TAPATGTYNLQEIVPGSVWMERDVYLQGPIWAKIPETGAHFHPSPAMGGFGLKHPPPM MLIKNTPVPGNITSFSDVPVSSFITQYSTGQVTVEMEWELKKENSKRWNPEIQYTNNYN DPQFVDFAPDSTGEYRTTRPIGTRYLTRPL) correspond to the amino acid residues of the 445 to 453 region of VP2 (SEQ ID NO: 10; TAPTGKRIDDHFPKRKKARTEEDSKPSTSSDAEAGPSGSQQLQIPAQPASSLGADTMSAG GGGPLGDNNQGADGVGNASGDWHCDSTWMGDRVVTKSTRTWVLPSYNNHQYREIKS GSVDGSNANAYFGYSTPWGYFDFNRFHSHWSPRDWQRLINNYWGFRPRSLRVKIFNIQ VKEVTVQDSTTTIANNLTSTVQVFTDDDYQLPYVVGNGTEGCLPAFPPQVFTLPQYGY ATLNRDNTENPTERSSFFCLEYFPSKMLRTGNNFEFTYNFEEVPFHSSFAPSQNLFKLAN PLVDQYLYRFVSTNNTGGVQFNKNLAGRYANTYKNWFPGPMGRTQGWNLGSGVNRA SVSAFATTNRMELEGASYQVPPQPNGMTNNLQGSNTYALENTMIFNSQPANPGTTATY LEGNMLITSESETQPVNRVAYNVGGQMATNNQSSTTAPATGTYNLQEIVPGSVWMERD VYLQGPIWAKIPETGAHFHPSPAMGGFGLKHPPPMMLIKNTPVPGNITSFSDVPVSSFITQ YSTGQVTVEMEWELKKENSKRWNPEIQYTNNYNDPQFVDFAPDSTGEYRTTRPIGTRY LTRPL) and to the amino acid residues of 389 to 397 region of VP3 (SEQ ID NO: 11; MSAGGGGPLGDNNQGADGVGNASGDWHCDSTWMGDRVVTKSTRTWVLPSYNNHQY REIKSGSVDGSNANAYFGYSTPWGYFDFNRFHSHWSPRDWQRLINNYWGFRPRSLRVK IFNIQVKEVTVQDSTTTIANNLTSTVQVFTDDDYQLPYVVGNGTEGCLPAFPPQVFTLPQ YGYATLNRDNTENPTERSSFFCLEYFPSKMLRTGNNFEFTYNFEEVPFHSSFAPSQNLFK LANPLVDQYLYRFVSTNNTGGVQFNKNLAGRYANTYKNWFPGPMGRTQGWNLGSGV NRASVSAFATTNRMELEGASYQVPPQPNGMTNNLQGSNTYALENTMIFNSQPANPGTT ATYLEGNMLITSESETQPVNRVAYNVGGQMATNNQSSTTAPATGTYNLQEIVPGSVWM ERDVYLQGPIWAKIPETGAHFHPSPAMGGFGLKHPPPMMLIKNTPVPGNITSFSDVPVSS FITQYSTGQVTVEMEWELKKENSKRWNPEIQYTNNYNDPQFVDFAPDSTGEYRTTRPIG TRYLTRPL). As used herein, “wild type 581 to 589 region” refers to a 581 to 589 region of VP1 having a sequence of ATGTYNLQE (SEQ ID NO: 9).

[0092] As used herein, “581 to 589 region” refers to a region or fragment of VP1 corresponding to amino acid residues 581 to 589 relative to the translational start of the VP1 polypeptide. The 581 to 589 region corresponds to amino acid residues 445 to 453 of VP2 and to amino acid residues 389 to 397 of VP3. The 581 to 589 region may confer tissue tropism or tissue preference to an AAV, and region variants may be engineered to confer tissue tropism or tissue preference to an rAAV formed from viral capsid polypeptides (VP1, VP2, and VP3) comprising the assembled variant. The VP1 with a generalized 581 to 589 region is provided in SEQ ID NO: 2 (MSFVDHPPDWLEEVGEGLREFLGLEAGPPKPKPNQQHQDQARGLVLPGYNYLGPGNG LDRGEPVNRADEVAREHDISYNEQLEAGDNPYLKYNHADAEFQEKLADDTSFGGNLG KAVFQAKKRVLEPFGLVEEGAKTAPTGKRIDDHFPKRKKARTEEDSKPSTSSDAEAGPS GSQQLQIPAQPASSLGADTMSAGGGGPLGDNNQGADGVGNASGDWHCDSTWMGDRV VTKSTRTWVLPSYNNHQYREIKSGSVDGSNANAYFGYSTPWGYFDFNRFHSHWSPRD WQRLINNYWGFRPRSLRVKIFNIQVKEVTVQDSTTTIANNLTSTVQVFTDDDYQLPYVV GNGTEGCLPAFPPQVFTLPQYGYATLNRDNTENPTERSSFFCLEYFPSKMLRTGNNFEFT YNFEEVPFHSSFAPSQNLFKLANPLVDQYLYRFVSTNNTGGVQFNKNLAGRYANTYKN WFPGPMGRTQGWNLGSGVNRASVSAFATTNRMELEGASYQVPPQPNGMTNNLQGSN TYALENTMIFNSQPANPGTTATYLEGNMLITSESETQPVNRVAYNVGGQMATNNQSST TAPX¹X²X³X⁴X⁵X⁶X⁷X⁸X⁹IVPGSVWMERDVYLQGPIWAKIPETGAHFHPSPAMGGFGLK HPPPMMLIKNTPVPGNITSFSDVPVSSFITQYSTGQVTVEMEWELKKENSKRWNPEIQYT NNYNDPQFVDFAPDSTGEYRTTRPIGTRYLTRPL), in which the 581 to 589 region has a sequence of X¹X₂X³X⁴X₅X⁶X⁷X⁸X⁹ (SEQ ID NO: 5014); wherein X¹, X², X³, X⁴, X⁵, X⁶, X⁷, X₈, and X⁹ are each independently selected from A, R, N, D, C, E, Q, G, H, I, L, K, M, F, P, S, T, W, Y, and V.

[0093] It should be understood that the present disclosure includes polynucleotide sequences encoding for any sequence disclosed herein. For example, if an amino acid sequence is provided, the present disclosure also encompasses a polynucleotide sequence encoding for said amino acid sequence.

[0094] It should be understood that further embodiments include mutations in VP1, VP2, VP3, or any combination thereof that do not alter the desired properties (e.g., a particular tissue tropism) or affect viral assembly, as described herein.

[0095] An AAV virion is made of a capsid that may include the AAV5 VP capsid polypeptides disclosed herein (e.g., VP1, VP2, and VP3 capsid polypeptides).

### Engineered Capsids and Capsid Polypeptides for Tissue Tropism

[0096] Described herein are engineered capsids, engineered capsid polypeptides, and 581 to 589 regions of capsid polypeptides that confer tissue tropism or preference (e.g., tissue-specific accumulation, tissue-specific infection, or both) to a viral capsid. In some embodiments, an engineered capsid may comprise one or more engineered capsid polypeptides assembled into a recombinant adeno-associated virus (rAAV) viral capsid. In some embodiments, an engineered capsid polypeptide may comprise a 581 to 589 region. The 581 to 589 region of viral capsid polypeptides, corresponding to amino acid residues 581 to 589 of the VP1 polypeptide, amino acid residues 445 to 453 of the VP2 polypeptide, and amino acid residues 389 to 397 of the VP3 polypeptide, is located at an AAV interface that likely interacts with host cells and tissues.

[0097] In some embodiments, an engineered capsid polypeptide may comprise a 581 to 589 region that confers increased tropism or preference for retina tissue relative to other ocular tissues as compared to a wild type AAV capsid polypeptide (e.g., a wild type AAV5 capsid polypeptide of SEQ ID NO: 1). For example, a retina tissue-tropic capsid polypeptide may have increased tropism for retina tissue and may be de-targeted to photoreceptor tissue, as compared to a wild type AAV5 capsid polypeptide. In some embodiments, an engineered capsid polypeptide may comprise a 581 to 589 region that confers increased tropism or preference for retinal pigment epithelium (RPE) tissue relative to other ocular tissues as compared to a wild type AAV capsid polypeptide (e.g., a wild type AAV5 capsid polypeptide of SEQ ID NO: 1). For example, a RPE tissue-tropic capsid polypeptide may have increased tropism for RPE tissue and may be de-targeted to photoreceptor tissue, as compared to a wild type AAV5 capsid polypeptide. In some embodiments, an engineered capsid polypeptide may comprise a 581 to 589 region that confers increased tropism or preference for choroid tissue relative to other ocular tissues as compared to a wild type AAV capsid polypeptide (e.g., a wild type AAV5 capsid polypeptide of SEQ ID NO: 1). For example, a choroid tissue-tropic capsid polypeptide may have increased tropism for choroid tissue and may be de-targeted to photoreceptor tissue, as compared to a wild type AAV5 capsid polypeptide. In some embodiments, an engineered capsid polypeptide may comprise a 581 to 589 region that confers increased tropism or preference for RPE tissue and choroid tissue relative to other ocular tissues as compared to a wild type AAV capsid polypeptide (e.g., a wild type AAV5 capsid polypeptide of SEQ ID NO: 1).

[0098] Also described herein are methods of using engineered capsids comprising engineered capsid polypeptides with 581 to 589 regions for tissue-specific delivery of a payload (e.g., a polynucleotide, such as a transgene) encapsidated by the engineered capsid. Recombinant AAVs comprising VP capsid polypeptides with 581 to 589 regions engineered for tissue specificity may be used to specifically infect a target tissue. Using tissue-tropic rAAV viral capsids for payload delivery provides numerous advantages over using adeno-associated virus (AAV) viral capsids that lack tissue tropism including reduced toxicity, lower dose needed to produce a therapeutic effect, wider therapeutic window, and reduced immune response. Furthermore, tissue-specific payload delivery may improve tissue-specificity of therapies following local administration. For example, an ocular tissue-tropic rAAV viral capsid may be intravitreally administered to specifically deliver a payload to the eye for treatment of an ocular disease. Alternatively or in addition, an ocular tissue-tropic rAAV viral capsid may be administered by sub-retinal injection or topical mucosal administration (e.g., via eye drops) to deliver a payload to the eye for treatment of an ocular disease. In some embodiments, an ocular tissue-tropic rAAV viral capsid may be administered systemically.

[0099] Ocular tissue tropism of the rAAV may reduce systemic effects (e.g., liver toxicity) from the therapy that may otherwise occur despite local administration. For example, an ocular tissue-tropic rAAV viral capsid may be engineered to target a specific ocular tissue (e.g., retinal tissue) while detargeting other ocular tissues (e.g., choroid, vitreous humor, or aqueous humor). Ocular tissue-tropic rAAV viral capsids may target a specific ocular cell type, such as retinal pigment epithelial cells or photoreceptor cells (e.g., rod cells, cone cells, or both). In some embodiments, an ocular tissue-tropic rAAV viral capsids may target a specific ocular cell type (e.g., retinal pigment epithelial cells) while detargeting one or more other ocular tissue or cell types (e.g., photoreceptor cells, choroid, vitreous humor, or aqueous humor). Such ocular tissue-specific rAAVs may enable specific targeting of regions within the eye for treatment of tissue-specific conditions, such as conditions of the retina, optic nerve, or choroid. In yet another example, an ocular tissue-tropic rAAV may accumulate in specific ocular tissue (e.g., retina) following intravitreal administration, sub-retinal injection, topical mucosal administration, or systemic administration. An ocular tissue-tropic rAAV may target a specific ocular cell type (e.g., retinal pigment epithelial cells, photoreceptor cells, or both) following intravitreal administration, sub-retinal injection, topical mucosal administration, or systemic administration. For example, a retina tissue-tropic rAAV may specifically accumulate in retina tissue and may be de-targeted from photoreceptor tissue. In another example, a RPE tissue-tropic rAAV may specifically accumulate in RPE tissue and may be de-targeted from photoreceptor tissue. In another example, a choroid tissue-tropic rAAV may specifically accumulate in choroid tissue and may be de-targeted from photoreceptor tissue. In another example, a choroid and RPE tissue-tropic rAAV may specifically accumulate in choroid and RPE tissue and may be de-targeted from photoreceptor tissue.

[0100] In some embodiments, a tissue-tropic capsid of the present disclosure may be ocular tissue-tropic. For example, an ocular tissue-tropic capsid polypeptide may confer increased tropism or preference for one or more ocular tissues (e.g., retinal tissue) as compared to a wild type VP capsid polypeptide (e.g., SEQ ID NO: 1). An ocular tissue-tropic capsid polypeptide may confer cellular homing to one or more ocular cell types (e.g., retinal pigment epithelial cells, photoreceptor cells, rod photoreceptor cells, cone photoreceptor cells, or combinations thereof).

[0101] An engineered capsid polypeptide of the present disclosure may comprise one or more amino acid substitutions relative to an AAV5 viral protein (VP) polypeptide (e.g., a VP1 polypeptide of SEQ ID NO: 1, a VP2 polypeptide of SEQ ID NO: 10, or a VP3 polypeptide of SEQ ID NO: 11). The engineered capsid polypeptide may comprise one or more amino acid substitutions relative to a VP1 polypeptide of any or all of SEQ ID NO: 3-SEQ ID NO: 8. In some embodiments, the engineered capsid polypeptide may comprise a 581 to 589 region comprising one or more amino acid substitutions in a region of a VP polypeptide (e.g., a 581 to 589 region of VP1, VP2, VP3, or a combination thereof) corresponding to amino acid residues 581 to 589 of VP1 (e.g., SEQ ID NO: 1), amino acid residues 445 to 453 of VP2 (e.g., SEQ ID NO: 10), or amino acid residues 389 to 397 of VP3 (e.g., SEQ ID NO: 11). In some embodiments, the 581 to 589 region may be present in VP1, VP2, and VP3. An engineered viral capsid may be assembled from VP1, VP2, and VP3 polypeptides comprising a 581 to 589 region. In some embodiments, the 581 to 589 region may confer ocular tissue tropism or preference.

[0102] In some embodiments, an engineered capsid polypeptide of the present disclosure may comprise a 581 to 589 region that confers increased retina tissue-tropism or preference as compared to a wild type AAV capsid polypeptide (e.g., a wild type AAV5 capsid polypeptide of SEQ ID NO: 1). For example, a 581 to 589 region that confers increased retina tissue-tropism may have a sequenced of any one of SEQ ID NO: 14-SEQ ID NO: 2013 or SEQ ID NO: 2514-SEQ ID NO: 4513. In some embodiments, an engineered capsid polypeptide of the present disclosure may comprise a 581 to 589 region that confers increased RPE tissue-tropism or preference as compared to a wild type AAV capsid polypeptide (e.g., a wild type AAV5 capsid polypeptide of SEQ ID NO: 1). For example, a 581 to 589 region that confers increased RPE tissue-tropism may have a sequenced of any one of SEQ ID NO: 2014-SEQ ID NO: 2513 or SEQ ID NO: 4514-SEQ ID NO: 5013. In some embodiments, an engineered capsid polypeptide of the present disclosure may comprise a 581 to 589 region that confers increased choroid tissue-tropism or preference as compared to a wild type AAV capsid polypeptide (e.g., a wild type AAV5 capsid polypeptide of SEQ ID NO: 1). For example, a 581 to 589 region that confers increased choroid tissue-tropism may have a sequenced of any one of SEQ ID NO: 2014-SEQ ID NO: 2513 or SEQ ID NO: 4514-SEQ ID NO: 5013.

### Capsid Engineering Methods

[0103] Disclosed herein is a system for high throughput engineering of engineered AAV capsids with modified function, including increased or decreased infectivity of desired tissues, such as increased targeting of ocular tissue (e.g., retinal tissue), decreased targeting of non-eye tissue, or selective targeting of a specific ocular tissue (e.g., retinal tissue) compared to other ocular tissues (e.g., aqueous humor or vitreous humor), relative to a wild type AAV5 capsid (e.g., comprising a VP capsid polypeptide of SEQ ID NO: 1). In some embodiments, the engineered AAV capsids may exhibit cellular homing to specific ocular cell types (e.g., retinal pigment epithelial cells, photoreceptor cells, rod photoreceptor cells, cone photoreceptor cells, or combinations thereof). A general schematic of the process is shown in FIG. 1. However, it should be understood that the present disclosure also encompasses reasonable variations or extensions to the method that are understood to those of ordinary skill in the art. The method may begin with production of a capsid library with theoretical diversity of 5×10¹¹ unique sequence variants. Higher or lower theoretical diversities are also encompassed herein. For example, a capsid library may have a theoretical diversity of from about 1×10³ to about 1×10²⁰. As shown in FIG. 1, the library may first be selected for the ability to assemble into viral capsids. The library may then be cloned into plasmids and transformed into bacteria. As shown in FIG. 1, the library plasmids may be subsequently screened for productive virion assembly in a production cell line. The assembled virions may then be administered intravitreally into non-human primates (NHP). In some embodiments, the assembled virions may be administered via sub-retinal injection, topical mucosal administration, or systemic administration. After a period of time sufficient for distribution, infection, and stable transduction, the NHP may be sacrificed, organs harvested, and sequences of AAV capsids in each tissue may be determined by deep sequencing. Eye tissues, including aqueous humor, choroid, retina, optic nerve, vitreous humor, and remaining eye tissue may be harvested for sequencing.

[0104] FIG. 2A provides a side view (top panel) and top view (bottom panel) of the surface of a prototype AAV virion, identifying residues of known AAV capsids, including AAV2, AAV5, AAV6, and AAV9, that have been shown in the research literature to interact with target cells. These target-interacting residues correspond to amino acids 581 to 589 in the AAV5 VP1 capsid protein.

[0105] FIG. 2B shows the salient elements of the library plasmid, illustrating rep and cap coding sequences positioned between AAV ITRs. In the illustrated embodiment, further described in EXAMPLE 1, variation is introduced into each of residues 581 to 589 of the AAV5 cap protein (“Library 581 to 589 region”) that is present in assembled VP1, VP2, and VP3 polypeptides. Each of the 20 natural amino acids is introduced at each of the 9 positions of the 581 to 589 region, providing a theoretical library diversity of 20⁹ (20\hat{ }9; approximately 5×10¹¹) unique sequence variants.

[0106] The 581 to 589 region targeted for engineering is the most likely to interact with target cell receptors, and relatively tolerant to changes without disrupting virion assembly. Unlike earlier approaches that add unstructured peptides that protrude above the virion 3-fold axis of symmetry, the current approach introduces sequence diversity that alters the characteristics of the binding pocket. In addition, this approach may change the overall structure of the receptor-binding trimer, allowing for altered allosteric interactions outside the binding pocket (e.g., AAVR PKD1). Introduced diversity is non-random, thereby reducing missense and frameshifts of randomized libraries.

[0107] By cloning the polynucleotide encoding the capsid variants into the packaged viral genome (between the ITRs), the recombinant virions with variant capsids carry polynucleotides having their cognate mutation, so the unique variant providing the desired function can be identified by sequencing packaged virus or infected cells.

[0108] In some embodiments, the capsid is a capsid selected from AAV1, AAV2, AAV3, AAV4, AAV5, AAV6, AAV7, AAV8, AAV9, AAV 10, AAV11, AAV12, AAV13, AAV14, AAV15, AAV16, AAV-DJ, AAV-DJ/8, AAV-DJ/9, AAV1/2, AAV.rh8, AAV.rh10, AAV.rh20, AAV.rh39, AAV.Rh43, AAV.Rh74, AAV.v66, AAV.Oligo001, AAV.SCH9, AAV.r3.45, AAV.RHM4-1, AAV.hu37, AAV.Anc80, AAV.Anc80L65, AAV.7m8, AAV.PhP.eB, AAV.PhP.V1, AAV.PHP.B, AAV.PhB.C1, AAV.PhB.C2, AAV.PhB.C3, AAV.PhB.C6, AAV.cy5, AAV2.5, AAV2tYF, AAV3B, AAV.LK03, AAV.HSC1, AAV.HSC2, AAV.HSC3, AAV.HSC4, AAV.HSC5, AAV.HSC6, AAV.HSC7, AAV.HSC8, AAV.HSC9, AAV.HSC10, AAV.HSC11, AAV.HSC12, AAV.HSC13, AAV.HSC14, AAV.HSC15, AAV.HSC16, AAV.HSC17, or AAVhu68, (described in WO2020/033842, incorporated herein by reference in its entirety). For example, the capsid may be an AAV5 capsid. The hu68 capsid is described in WO 2018/160582, incorporated herein by reference in its entirety.

[0109] Such capsids may comprise a 581 to 589 region corresponding amino acid residues 581 to 589 of the AAV5 VP1, and as such analogous engineered VP capsids with desired tissue tropism, ability to assemble, and exhibit various other desired traits are encompassed herein. Thus, any one of the engineered AAV5 VP capsid polypeptides disclosed herein having a mutation or substitution in the 581 to 589 region corresponding to the 581 to 589 region of AAV5 VP1 may be inserted into the corresponding region in any one of the other AAV capsids described herein and the present disclosure encompasses such variants.

[0110] In some embodiments, the capsid is a derivative, modification, or pseudotype of AAV1, AAV2, AAV3, AAV4, AAV5, AAV6, AAV7, AAV8, AAV9, AAV 10, AAV11, AAV12, AAV13, AAV14, AAV15, AAV16, AAV-DJ, AAV-DJ/8, AAV-DJ/9, AAV1/2, AAV.rh8, AAV.rh10, AAV.rh20, AAV.rh39, AAV.Rh43, AAV.Rh74, AAV.v66, AAV.Oligo001, AAV.SCH9, AAV.r3.45, AAV.RHM4-1, AAV.hu37, AAV.Anc80, AAV.Anc80L65, AAV.7m8, AAV.PhP.eB, AAV.PhP.V1, AAV.PHP.B, AAV.PhB.C1, AAV.PhB.C2, AAV.PhB.C3, AAV.PhB.C6, AAV.cy5, AAV2.5, AAV2tYF, AAV3B, AAV.LK03, AAV.HSC1, AAV.HSC2, AAV.HSC3, AAV.HSC4, AAV.HSC5, AAV.HSC6, AAV.HSC7, AAV.HSC8, AAV.HSC9, AAV.HSC10, AAV.HSC11, AAV.HSC12, AAV.HSC13, AAV.HSC14, AAV.HSC15, AAV.HSC16, AAV.HSC17, or AAVhu68. For example, the capsid may be a derivative of AAV5.

[0111] In some embodiments, capsid protein is a chimera of capsid proteins from two or more serotype selected from AAV1, AAV2, AAV3, AAV4, AAV5, AAV6, AAV7, AAV8, AAV9, AAV 10, AAV11, AAV12, AAV13, AAV14, AAV15, AAV16, AAV-DJ, AAV-DJ/8, AAV-DJ/9, AAV1/2, AAV.rh8, AAV.rh10, AAV.rh20, AAV.rh39, AAV.Rh43, AAV.Rh74, AAV.v66, AAV.Oligo001, AAV.SCH9, AAV.r3.45, AAV.RHM4-1, AAV.hu37, AAV.Anc80, AAV.Anc80L65, AAV.7m8, AAV.PhP.eB, AAV.PhP.V1, AAV.PHP.B, AAV.PhB.C1, AAV.PhB.C2, AAV.PhB.C3, AAV.PhB.C6, AAV.cy5, AAV2.5, AAV2tYF, AAV3B, AAV.LK03, AAV.HSC1, AAV.HSC2, AAV.HSC3, AAV.HSC4, AAV.HSC5, AAV.HSC6, AAV.HSC7, AAV.HSC8, AAV.HSC9, AAV.HSC10, AAV.HSC11, AAV.HSC12, AAV.HSC13, AAV.HSC14, AAV.HSC15, AAV.HSC17, AAVhu68, and AAV.HSC16 (described in WO2020/033842, incorporated herein by reference in its entirety). In certain embodiments, the capsid is an rh32.33 capsid, described in U.S. Pat. No. 8,999,678, incorporated herein by reference in its entirety.

[0112] Such capsids may comprise a 581 to 589 region corresponding to 581 to 589 of the AAV5 VP1, and as such analogous engineered VP capsids with desired tissue tropism, ability to assemble, and exhibit various other desired traits are encompassed herein.

### VP-Encoding Polynucleotides, Vectors, and Vector Libraries

[0113] Accordingly, in a first aspect, polynucleotides are provided. The polynucleotides encode an adeno-associated virus (AAV) VP1 capsid polypeptide having the amino acid sequence of SEQ ID NO: 2, wherein X¹, X², X³, X⁴, X⁵, X⁶, X⁷, X⁸, and X⁹ are each independently selected from the 20 naturally occurring amino acids, using standard one letter codes, from A, R, N, D, C, E, Q, G, H, I, L, K, M, F, P, S, T, W, Y, and V. The sequence X¹X₂X³X⁴X⁵X⁶X⁷X⁸X⁹ of SEQ ID NO: 2 corresponds to the 581 to 589 region of VP1. X¹ corresponds to a position 581 of the 581 to 589 region. X² corresponds to a position 582 of the 581 to 589 region. X³ corresponds to a position 583 of the 581 to 589 region. X⁴ corresponds to a position 584 of the 581 to 589 region. X⁵ corresponds to a position 585 of the 581 to 589 region. X⁶ corresponds to a position 586 of the 581 to 589 region. X⁷ corresponds to a position 587 of the 581 to 589 region. X⁸ corresponds to a position 588 of the 581 to 589 region. X⁹ corresponds to a position 589 of the 581 to 589 region. The polynucleotide encodes a polypeptide that includes at least one mutation of the native AAV5 capsid and thus does not have the sequence of SEQ ID NO: 1. In addition, the polypeptide does not have the sequence of SEQ ID NO: 3, SEQ ID NO: 4, SEQ ID NO: 5, SEQ ID NO: 6, SEQ ID NO: 7, or SEQ ID NO: 8. In some embodiments, the VP1 capsid polypeptide comprises a 581 to 589 region. For example, a VP1 capsid polypeptide comprising a 581 to 589 region may comprise a sequence of SEQ ID NO: 1 in which residues 581 to residue 589 are replaced with a sequence of X¹X²X³X⁴X⁵X⁶X⁷X⁸X⁹ (SEQ ID NO: 5014), wherein X¹, X², X³, X⁴, X⁵, X⁶, X⁷, X⁸, and X⁹ are each independently selected from A, R, N, D, C, E, Q, G, H, I, L, K, M, F, P, S, T, W, Y, and V, and wherein the VP1 capsid polypeptide does not have the sequence of any of SEQ ID NO: 1, SEQ ID NO: 3 (MSFVDHPPDWLEEVGEGLREFLGLEAGPPKPKPNQQHQDQARGLVLPGYNYLGPGNG LDRGEPVNRADEVAREHDISYNEQLEAGDNPYLKYNHADAEFQEKLADDTSFGGNLG KAVFQAKKRVLEPFGLVEEGAKTAPTGKRIDDHFPKRKKARTEEDSKPSTSSDAEAGPS GSQQLQIPAQPASSLGADTMSAGGGGPLGDNNQGADGVGNASGDWHCDSTWMGDRV VTKSTRTWVLPSYNNHQYREIKSGSVDGSNANAYFGYSTPWGYFDFNRFHSHWSPRD WQRLINNYWGFRPRSLRVKIFNIQVKEVTVQDSTTTIANNLTSTVQVFTDDDYQLPYVV GNGTEGCLPAFPPQVFTLPQYGYATLNRDNTENPTERSSFFCLEYFPSKMLRTGNNFEFT YNFEEVPFHSSFAPSQNLFKLANPLVDQYLYRFVSTNNTGGVQFNKNLAGRYANTYKN WFPGPMGRTQGWNLGSGVNRASVSAFATTNRMELEGASYQVPPQPNGMTNNLQGSN TYALENTMIFNSQPANPGTTATYLEGNMLITSESETQPVNRVAYNVGGQMATNNQSST TAPATGTVNLQEIVPGSVWMERDVYLQGPIWAKIPETGAHFHPSPAMGGFGLKHPPPM MLIKNTPVPGNITSFSDVPVSSFITQYSTGQVTVEMEWELKKENSKRWNPEIQYTNNYN DPQFVDFAPDSTGEYRTTRPIGTRYLTRPL), SEQ ID NO: 4 (MSFVDHPPDWLEEVGEGLREFLGLEAGPPKPKPNQQHQDQARGLVLPGYNYLGPGNG LDRGEPVNRADEVAREHDISYNEQLEAGDNPYLKYNHADAEFQEKLADDTSFGGNLG KAVFQAKKRVLEPFGLVEEGAKTAPTGKRIDDHFPKRKKARTEEDSKPSTSSDAEAGPS GSQQLQIPAQPASSLGADTMSAGGGGPLGDNNQGADGVGNASGDWHCDSTWMGDRV VTKSTRTWVLPSYNNHQYREIKSGSVDGSNANAYFGYSTPWGYFDFNRFHSHWSPRD WQRLINNYWGFRPRSLRVKIFNIQVKEVTVQDSTTTIANNLTSTVQVFTDDDYQLPYVV GNGTEGCLPAFPPQVFTLPQYGYATLNRDNTENPTERSSFFCLEYFPSKMLRTGNNFEFT YNFEEVPFHSSFAPSQNLFKLANPLVDQYLYRFVSTNNTGGVQFNKNLAGRYANTYKN WFPGPMGRTQGWNLGSGVNRASVSAFATTNRMELEGASYQVPPQPNGMTNNLQGSN TYALENTMIFNSQPANPGTTATYLEGNMLITSESETQPVNRVAYNVGGQMATNNQSST TAPATGTYNTQEIVPGSVWMERDVYLQGPIWAKIPETGAHFHPSPAMGGFGLKHPPPM MLIKNTPVPGNITSFSDVPVSSFITQYSTGQVTVEMEWELKKENSKRWNPEIQYTNNYN DPQFVDFAPDSTGEYRTTRPIGTRYLTRPL), SEQ ID NO: 5 (MSFVDHPPDWLEEVGEGLREFLGLEAGPPKPKPNQQHQDQARGLVLPGYNYLGPGNG LDRGEPVNRADEVAREHDISYNEQLEAGDNPYLKYNHADAEFQEKLADDTSFGGNLG KAVFQAKKRVLEPFGLVEEGAKTAPTGKRIDDHFPKRKKARTEEDSKPSTSSDAEAGPS GSQQLQIPAQPASSLGADTMSAGGGGPLGDNNQGADGVGNASGDWHCDSTWMGDRV VTKSTRTWVLPSYNNHQYREIKSGSVDGSNANAYFGYSTPWGYFDFNRFHSHWSPRD WQRLINNYWGFRPRSLRVKIFNIQVKEVTVQDSTTTIANNLTSTVQVFTDDDYQLPYVV GNGTEGCLPAFPPQVFTLPQYGYATLNRDNTENPTERSSFFCLEYFPSKMLRTGNNFEFT YNFEEVPFHSSFAPSQNLFKLANPLVDQYLYRFVSTNNTGGVQFNKNLAGRYANTYKN WFPGPMGRTQGWNLGSGVNRASVSAFATTNRMELEGASYQVPPQPNGMTNNLQGSN TYALENTMIFNSQPANPGTTATYLEGNMLITSESETQPVNRVAYNVGGQMATNNQSST TAPTTGTYNLQEIVPGSVWMERDVYLQGPIWAKIPETGAHFHPSPAMGGFGLKHPPPM MLIKNTPVPGNITSFSDVPVSSFITQYSTGQVTVEMEWELKKENSKRWNPEIQYTNNYN DPQFVDFAPDSTGEYRTTRPIGTRYLTRPL), SEQ ID NO: 6 (MSFVDHPPDWLEEVGEGLREFLGLEAGPPKPKPNQQHQDQARGLVLPGYNYLGPGNG LDRGEPVNRADEVAREHDISYNEQLEAGDNPYLKYNHADAEFQEKLADDTSFGGNLG KAVFQAKKRVLEPFGLVEEGAKTAPTGKRIDDHFPKRKKARTEEDSKPSTSSDAEAGPS GSQQLQIPAQPASSLGADTMSAGGGGPLGDNNQGADGVGNASGDWHCDSTWMGDRV VTKSTRTWVLPSYNNHQYREIKSGSVDGSNANAYFGYSTPWGYFDFNRFHSHWSPRD WQRLINNYWGFRPRSLRVKIFNIQVKEVTVQDSTTTIANNLTSTVQVFTDDDYQLPYVV GNGTEGCLPAFPPQVFTLPQYGYATLNRDNTENPTERSSFFCLEYFPSKMLRTGNNFEFT YNFEEVPFHSSFAPSQNLFKLANPLVDQYLYRFVSTNNTGGVQFNKNLAGRYANTYKN WFPGPMGRTQGWNLGSGVNRASVSAFATTNRMELEGASYQVPPQPNGMTNNLQGSN TYALENTMIFNSQPANPGTTATYLEGNMLITSESETQPVNRVAYNVGGQMATNNQSST TAPAAGTYNLQEIVPGSVWMERDVYLQGPIWAKIPETGAHFHPSPAMGGFGLKHPPPM MLIKNTPVPGNITSFSDVPVSSFITQYSTGQVTVEMEWELKKENSKRWNPEIQYTNNYN DPQFVDFAPDSTGEYRTTRPIGTRYLTRPL), SEQ ID NO: 7 (MSFVDHPPDWLEEVGEGLREFLGLEAGPPKPKPNQQHQDQARGLVLPGYNYLGPGNG LDRGEPVNRADEVAREHDISYNEQLEAGDNPYLKYNHADAEFQEKLADDTSFGGNLG KAVFQAKKRVLEPFGLVEEGAKTAPTGKRIDDHFPKRKKARTEEDSKPSTSSDAEAGPS GSQQLQIPAQPASSLGADTMSAGGGGPLGDNNQGADGVGNASGDWHCDSTWMGDRV VTKSTRTWVLPSYNNHQYREIKSGSVDGSNANAYFGYSTPWGYFDFNRFHSHWSPRD WQRLINNYWGFRPRSLRVKIFNIQVKEVTVQDSTTTIANNLTSTVQVFTDDDYQLPYVV GNGTEGCLPAFPPQVFTLPQYGYATLNRDNTENPTERSSFFCLEYFPSKMLRTGNNFEFT YNFEEVPFHSSFAPSQNLFKLANPLVDQYLYRFVSTNNTGGVQFNKNLAGRYANTYKN WFPGPMGRTQGWNLGSGVNRASVSAFATTNRMELEGASYQVPPQPNGMTNNLQGSN TYALENTMIFNSQPANPGTTATYLEGNMLITSESETQPVNRVAYNVGGQMATNNQSST TAPATGAYNLQEIVPGSVWMERDVYLQGPIWAKIPETGAHFHPSPAMGGFGLKHPPPM MLIKNTPVPGNITSFSDVPVSSFITQYSTGQVTVEMEWELKKENSKRWNPEIQYTNNYN DPQFVDFAPDSTGEYRTTRPIGTRYLTRPL), or SEQ ID NO: 8 (MSFVDHPPDWLEEVGEGLREFLGLEAGPPKPKPNQQHQDQARGLVLPGYNYLGPGNG LDRGEPVNRADEVAREHDISYNEQLEAGDNPYLKYNHADAEFQEKLADDTSFGGNLG KAVFQAKKRVLEPFGLVEEGAKTAPTGKRIDDHFPKRKKARTEEDSKPSTSSDAEAGPS GSQQLQIPAQPASSLGADTMSAGGGGPLGDNNQGADGVGNASGDWHCDSTWMGDRV VTKSTRTWVLPSYNNHQYREIKSGSVDGSNANAYFGYSTPWGYFDFNRFHSHWSPRD WQRLINNYWGFRPRSLRVKIFNIQVKEVTVQDSTTTIANNLTSTVQVFTDDDYQLPYVV GNGTEGCLPAFPPQVFTLPQYGYATLNRDNTENPTERSSFFCLEYFPSKMLRTGNNFEFT YNFEEVPFHSSFAPSQNLFKLANPLVDQYLYRFVSTNNTGGVQFNKNLAGRYANTYKN WFPGPMGRTQGWNLGSGVNRASVSAFATTNRMELEGASYQVPPQPNGMTNNLQGSN TYALENTMIFNSQPANPGTTATYLEGNMLITSESETQPVNRVAYNVGGQMATNNQSST TAPATGTVNTQEIVPGSVWMERDVYLQGPIWAKIPETGAHFHPSPAMGGFGLKHPPPM MLIKNTPVPGNITSFSDVPVSSFITQYSTGQVTVEMEWELKKENSKRWNPEIQYTNNYN DPQFVDFAPDSTGEYRTTRPIGTRYLTRPL).

[0114] In some embodiments, a polynucleotide of the present disclosure may encode an AAV VP1 capsid polypeptide having the amino acid sequence of SEQ ID NO: 2, wherein X¹X²X³X⁴X⁵X⁶X⁷X⁸X⁹ of SEQ ID NO: 2 is any one of SEQ ID NO: 14-SEQ ID NO: 2013 or SEQ ID NO: 2514-SEQ ID NO: 4513. In some embodiments, a polynucleotide of the present disclosure may encode an AAV VP1 capsid polypeptide having the amino acid sequence of SEQ ID NO: 2, wherein X¹X²X³X⁴X⁵X⁶X⁷X⁸X⁹ of SEQ ID NO: 2 is any one of SEQ ID NO: 2014-SEQ ID NO: 2513 or SEQ ID NO: 4514-SEQ ID NO: 5013.

[0115] In some embodiments, the polynucleotide encodes an AAV VP1 capsid polypeptide that further comprises one or more mutations at an amino acid residue outside of the 581 to 589 region, with reference to SEQ ID NO: 1, wherein the resulting recombinant capsid is capable of forming an assembled virion that exhibits desired tissue targeting as compared to wild type AAV5 (SEQ ID NO: 1). The one or more mutations may confer increased tissue tropism or preference (e.g., increased retinal tissue tropism) on the assembled virion as compared to a wild type AAV capsid polypeptide (e.g., a wild type AAV5 capsid polypeptide of SEQ ID NO: 1).

[0116] In another aspect, a vector capable of replication in prokaryotic cells is provided, wherein the vector comprises the polynucleotide described immediately above. In typical embodiments, the vector is a plasmid encoding a replication competent AAV genome.

[0117] In a further aspect, a library is provided. The library comprises a plurality of vectors comprising the AAV capsid-encoding polynucleotides. In some embodiments, the vectors are plasmids, and the plurality of plasmids comprise a plurality of different AAV VP-encoding polynucleotides. The library may comprise a plurality of vectors encoding AAV VP1 capsid polypeptides having the amino acid sequence of SEQ ID NO: 2 comprising one or more amino acid variations in the 581 to 589 region.

[0118] In various embodiments, the library encodes at least 1×10⁹ different AAV VP capsid polypeptides, at least 2.5×10⁹ different AAV VP capsid polypeptides, at least 5×10⁹ different AAV VP capsid polypeptides, at least 7.5×10⁹ different AAV VP capsid polypeptides, at least 1×10¹⁰ different AAV VP capsid polypeptides, at least 2.5×10¹⁰ different AAV VP capsid polypeptides, at least 5×10¹⁰ different AAV VP capsid polypeptides, at least 7.5×10¹⁰ different AAV VP capsid polypeptides, at least 1×10¹¹ different AAV VP capsid polypeptides, at least 2.5×10¹¹ different AAV VP capsid polypeptides, or at least 5×10¹¹ different AAV VP capsid polypeptides. The library may encode VP capsid polypeptides comprising 581 to 589 region variants.

[0119] In another aspect, prokaryotic cells comprising the vectors are provided. In some embodiments, the prokaryotic cell is an E. coli cell and the vector is a plasmid.

[0120] In a related aspect, libraries are provided, the library comprising a plurality of E. coli cells, wherein the plurality of cells comprise a plurality of plasmids, wherein the plurality of plasmids comprise a plurality of different AAV VP-encoding polynucleotides.

[0121] In some embodiments, the library encodes at least 1×10⁹ different AAV VP capsid polypeptides, at least 2.5×10⁹ different AAV VP capsid polypeptides, at least 5×10⁹ different AAV VP capsid polypeptides, at least 7.5×10⁹ different AAV VP capsid polypeptides, at least 1×10¹⁰ different AAV VP capsid polypeptides, at least 5×10¹⁰ different AAV VP capsid polypeptides, at least 7.5×10¹⁰ different AAV VP capsid polypeptides, at least 1×10¹¹ different AAV VP capsid polypeptides, at least 2.5×10¹¹ different AAV VP capsid polypeptides, or at least 5×10¹¹ different AAV VP capsid polypeptides. The library may encode VP capsid polypeptides comprising 581 to 589 region variants.

### VP Polypeptides, Peptide Libraries

[0122] In another aspect, AAV VP1 capsid polypeptides are provided. The polypeptide has the amino acid sequence of SEQ ID NO: 2, wherein X¹, X², X³, X⁴, X⁵, X⁶, X⁷, X⁸, and X⁹ are each independently selected from A, R, N, D, C, E, Q, G, H, I, L, K, M, F, P, S, T, W, Y, and V. The polypeptide includes at least one mutation as compared to native AAV VP1, and thus does not have the sequence of SEQ ID NO: 1. In addition, the polypeptide does not have the sequence of SEQ ID NO: 3, SEQ ID NO: 4, SEQ ID NO: 5, SEQ ID NO: 6, SEQ ID NO: 7, or SEQ ID NO: 8.

[0123] In some embodiments, the polypeptide further comprises one or more mutations at an amino acid residue outside of the 581 to 589 region, with reference to SEQ ID NO: 1, wherein the resulting recombinant capsid is capable of forming an assembled virion that exhibits desired tissue targeting as compared to a wild type AAV5 comprising a VP capsid polypeptide of SEQ ID NO: 1.

[0124] In a further aspect, libraries are provided, the libraries comprising a plurality of polypeptides as described immediately above, the plurality having different primary amino acid sequences. A library may comprise a plurality of polypeptides of SEQ ID NO: 2 comprising one or more amino acid variations in the 581 to 589 region.

[0125] In some embodiments, library comprises at least 1×10⁹ different AAV VP capsid polypeptides, at least 2.5×10⁹ different AAV VP capsid polypeptides, at least 5×10⁹ different AAV VP capsid polypeptides, at least 7.5×10⁹ different AAV VP capsid polypeptides, at least 1×10¹⁰ different AAV VP capsid polypeptides, at least 2.5×10¹⁰ different AAV VP capsid polypeptides, at least 5×10¹⁰ different AAV VP capsid polypeptides, at least 7.5×10¹⁰ different AAV VP capsid polypeptides, at least 1×10¹¹ different AAV VP capsid polypeptides, at least 2.5×10¹¹ different AAV VP capsid polypeptides, or at least 5×10¹¹ different AAV VP capsid polypeptides. The library may comprise VP capsid polypeptides comprising 581 to 589 region variants.

[0126] In certain embodiments, the library comprises at least from about 1×10⁵ to at least about 5×10¹¹ different AAV VP capsid polypeptides. In certain embodiments, the library comprises at least about 1×10⁵, at least about 2×10⁵, at least about 3×10⁵, at least about 4×10⁵, at least about 5×10⁵, at least about 6×10⁵, at least about 7×10⁵, at least about 8×10⁵, at least about 9×10⁵, at least about 1×10⁶, at least about 2×10⁶, at least about 3×10⁶, at least about 4×10⁶, at least about 5×10⁶, at least about 6×10⁶, at least about 7×10⁶, at least about 8×10⁶, at least about 9×10⁶, at least about 1×10⁷, at least about 2×10⁷, at least about 3×10⁷, at least about 4×10⁷, at least about 5×10⁷, at least about 6×10⁷, at least about 7×10⁷, at least about 8×10⁷, at least about 9×10⁷, at least about 1×10⁸, at least about 2×10⁸, at least about 3×10⁸, at least about 4×10⁸, at least about 5×10⁸, at least about 6×10⁸, at least about 7×10⁸, at least about 8×10⁸, at least about 9×10⁸, at least about 1×10⁹, at least about 2×10⁹, at least about 3×10⁹, at least about 4×10⁹, at least about 5×10⁹, at least about 6×10⁹, at least about 7×10⁹, at least about 8×10⁹, at least about 9×10⁹, at least about 1×10¹⁰, at least about 2×10¹⁰, at least about 3×10¹⁰, at least about 4×10¹⁰, at least about 5×10¹⁰, at least about 6×10¹⁰, at least about 7×10¹⁰, at least about 8×10¹⁰, at least about 9×10¹⁰, at least about 1×10¹¹, at least about 2×10¹¹, at least about 3×10¹¹, at least about 4×10¹¹, or at least about 5×10¹¹ AAV VP capsid polypeptides.

[0127] In certain embodiments, provided herein is a recombinant adeno-associated virus AAV VP1 capsid polypeptide having at least one mutation in a residue of region 581 to residue 589 in SEQ ID NO: 1, inclusive, wherein the mutation confers at least about 1.1-fold, at least about 1.2-fold, at least about 1.3-fold, at least about 1.4-fold, at least about 1.5-fold, at least about 1.6-fold, at least about 1.7-fold, at least about 1.8-fold, at least about 1.9-fold, at least about 2-fold, at least about 2.2-fold, at least about 2.4-fold, at least about 2.6-fold, at least about 2.8-fold, at least about 3-fold, at least about 3.5-fold, at least about 4-fold, at least about 4.5-fold, at least about 5-fold, at least about 6-fold, at least about 7-fold, at least about 8-fold, at least about 9-fold, at least about 10-fold, at least about 20-fold, at least about 30-fold, at least about 40-fold, at least about 50-fold, at least about 100-fold, at least about 200-fold, at least about 300-fold, at least about 400-fold, or at least about 500-fold increased accumulation of an AAV virion having said AAV VP1 capsid polypeptide in a target tissue (e.g., a retinal tissue), target cell (e.g., retinal pigment epithelial cells, photoreceptor cells, rod photoreceptor cells, cone photoreceptor cells, or combinations thereof), or both as compared to a non-target tissue (e.g., vitreous humor or aqueous humor), as compared to wild type AAV virion having a wild type AAV5 VP1 capsid polypeptide, and wherein the AAVVP1 capsid polypeptide does not have the sequence of any of SEQ ID NO: 1, SEQ ID NO: 3, SEQ ID NO: 4, SEQ ID NO: 5, SEQ ID NO: 6, SEQ ID NO: 7, or SEQ ID NO: 8. In some embodiments, a VP1 capsid polypeptide comprises a 581 to 589 region comprising one or more amino acid mutations. For example, a VP1 capsid polypeptide may comprise a sequence of SEQ ID NO: 1 in which residues 581 to residue 589 are replaced with a sequence of X¹X²X³X⁴X⁵X⁶X⁷X⁸X⁹ (SEQ ID NO: 5014), wherein X¹, X², X³, X⁴, X⁵, X⁶, X⁷, X⁸, and X⁹ are each independently selected from A, R, N, D, C, E, Q, G, H, I, L, K, M, F, P, S, T, W, Y, and V, and wherein the VP1 capsid polypeptide does not have the sequence of any of SEQ ID NO: 1, SEQ ID NO: 3, SEQ ID NO: 4, SEQ ID NO: 5, SEQ ID NO: 6, SEQ ID NO: 7, or SEQ ID NO: 8.

[0128] In some embodiments, an AAV VP1 capsid polypeptide of the present disclosure may have an amino acid sequence of SEQ ID NO: 2, wherein X¹X²X³X⁴X⁵X⁶X⁷X⁸X⁹ of SEQ ID NO: 2 is any one of SEQ ID NO: 14-SEQ ID NO: 2013 or SEQ ID NO: 2514-SEQ ID NO: 4513. In some embodiments, an AAV VP1 capsid polypeptide of the present disclosure may have an amino acid sequence of SEQ ID NO: 2, wherein X¹X²X³X⁴X⁵X⁶X⁷X⁸X⁹ of SEQ ID NO: 2 is any one of SEQ ID NO: 2014-SEQ ID NO: 2513 or SEQ ID NO: 4514-SEQ ID NO: 5013.

rAAV Virions, Virion Libraries

[0129] In another aspect, recombinant AAV virions (rAAV) are provided. The virion comprises an AAV VP capsid polypeptide as described above. In some embodiments, the rAAV has increased tropism for primate and human ocular tissue (e.g., retinal tissue), or may have increased accumulation in ocular cells (e.g., retinal pigment epithelial cells, photoreceptor cells, rod photoreceptor cells, cone photoreceptor cells, or combinations thereof), or both, as compared to a rAAV having the native AAV5 VP1 capsid polypeptide (SEQ ID NO:1). In some embodiments, the rAAV has increased ability to assemble, or exhibits greater virion stability, as compared to a rAAV having the native AAV5 VP1 capsid polypeptide (SEQ ID NO: 1).

[0130] In certain of these embodiments, the rAAV has increased ability to infect one or more ocular tissues selected from aqueous humor, choroid, retina, optic nerve, vitreous humor, and combinations thereof following intravitreal administration, sub-retinal injection, topical mucosal administration, or systemic administration as compared to a rAAV having the native AAV5 VP1 capsid polypeptide (SEQ ID NO: 1). In some embodiments, the rAAV has increased tissue tropism for retinal tissue compared to a wild type AAV5 capsid. In some embodiments, the rAAV has increased accumulation in photoreceptor cells (e.g., rod photoreceptor cells, cone photoreceptor cells, or a combination thereof), retinal pigment epithelial cells, or both, compared to a wild type AAV5 capsid.

[0131] Additionally, provided are polynucleotide sequences encoding the rAAV capsid VP proteins described herein.

[0132] In a further aspect, libraries are provided that comprise a plurality of rAAV as described above. The plurality of rAAVs comprise a plurality of VP capsid polypeptides having different primary amino acid sequences. An rAAV of the plurality of rAAVs may comprise a polypeptide of SEQ ID NO: 2 comprising one or more amino acid variations in the 581 to 589 region.

[0133] In some embodiments, the library comprises at least 1×10⁹ different AAV VP capsid polypeptides, at least 2.5×10⁹ different AAV VP capsid polypeptides, at least 5×10⁹ different AAV VP capsid polypeptides, at least 7.5×10⁹ different AAV VP capsid polypeptides, at least 1×10¹⁰ different AAV VP capsid polypeptides, at least 2.5×10¹⁰ different AAV VP capsid polypeptides, at least 5×10¹⁰ different AAV VP capsid polypeptides, at least 7.5×10¹⁰ different AAV VP capsid polypeptides, at least 1×10¹¹ different AAV VP capsid polypeptides, at least 2.5×10¹¹ different AAV VP capsid polypeptides, or at least 5×10¹¹ different AAV VP capsid polypeptides. The library may comprise AAV VP capsid polypeptides comprising 581 to 589 region variants. For example, a VP1 capsid polypeptide may comprise a sequence of SEQ ID NO: 1 in which residues 581 to residue 589 are replaced with a sequence of X¹X²X³X⁴X⁵X⁶X⁷X⁸X⁹ (SEQ ID NO: 5014), wherein X¹, X², X³, X⁴, X⁵, X⁶, X⁷, X⁸, and X⁹ are each independently selected from A, R, N, D, C, E, Q, G, H, I, L, K, M, F, P, S, T, W, Y, and V, and wherein the VP1 capsid polypeptide does not have the sequence of any of SEQ ID NO: 1, SEQ ID NO: 3, SEQ ID NO: 4, SEQ ID NO: 5, SEQ ID NO: 6, SEQ ID NO: 7, or SEQ ID NO: 8.

[0134] In some embodiments, an AAV virion of the present disclosure may comprise an AAV VP1 capsid polypeptide having an amino acid sequence of SEQ ID NO: 2, wherein X¹X²X³X⁴X⁵X⁶X⁷X⁸X⁹ of SEQ ID NO: 2 is any one of SEQ ID NO: 14-SEQ ID NO: 2013 or SEQ ID NO: 2514-SEQ ID NO: 4513. In some embodiments, an AAV virion of the present disclosure may comprise an AAV VP1 capsid polypeptide having an amino acid sequence of SEQ ID NO: 2, wherein X¹X²X³X⁴X⁵X⁶X⁷X⁸X⁹ of SEQ ID NO: 2 is any one of SEQ ID NO: 2014-SEQ ID NO: 2513 or SEQ ID NO: 4514-SEQ ID NO: 5013.

### Pharmaceutical Compositions

[0135] In another aspect, pharmaceutical compositions are provided. The pharmaceutical composition comprises a rAAV as described above and a pharmaceutically acceptable carrier.

[0136] A pharmaceutical composition can comprise a first active ingredient. The first active ingredient can comprise a viral vector as described herein and/or any payload as described herein. The pharmaceutical composition can be formulated in unit dose form. The pharmaceutical composition can comprise a pharmaceutically acceptable excipient, diluent, or carrier. The pharmaceutical composition can comprise a second, third, or fourth active ingredient—such as to facilitate enhanced gene replacement, RNA editing, DNA editing, or imaging.

[0137] A pharmaceutical composition described herein can compromise an excipient. An excipient can comprise a cryo-preservative, such as DMSO, glycerol, polyvinylpyrrolidone (PVP), or any combination thereof. An excipient can comprise a cryo-preservative, such as a sucrose, a trehalose, a starch, a salt of any of these, a derivative of any of these, or any combination thereof. An excipient can comprise a pH agent (to minimize oxidation or degradation of a component of the composition), a stabilizing agent (to prevent modification or degradation of a component of the composition), a buffering agent (to enhance temperature stability), a solubilizing agent (to increase protein solubility), or any combination thereof. An excipient can comprise a surfactant, a sugar, an amino acid, an antioxidant, a salt, a non-ionic surfactant, a solubilizer, a triglyceride, an alcohol, or any combination thereof. An excipient can comprise sodium carbonate, acetate, citrate, phosphate, poly-ethylene glycol (PEG), human serum albumin (HSA), sorbitol, sucrose, trehalose, polysorbate 80, sodium phosphate, sucrose, disodium phosphate, mannitol, polysorbate 20, histidine, citrate, albumin, sodium hydroxide, glycine, sodium citrate, trehalose, arginine, sodium acetate, acetate, HCl, disodium edetate, lecithin, glycerol, xanthan rubber, soy isoflavones, polysorbate 80, ethyl alcohol, water, teprenone, or any combination thereof.

[0138] Compositions and methods provided herein can utilize pharmaceutical compositions. The compositions described throughout can be formulated into a pharmaceutical and be used to treat a human or mammal, in need thereof, diagnosed with a disease. In some cases, pharmaceutical compositions can be used prophylactically.

[0139] The compositions provided herein can be utilized in methods provided herein. Any of the provided compositions provided herein can be utilized in methods provided herein. In some cases, a method comprises at least partially preventing, reducing, ameliorating, and/or treating a disease or condition, or a symptom of a disease or condition. A subject can be a human or non-human. A subject can be a mammal (e.g., rat, mouse, cow, dog, pig, sheep, horse). A subject can be a vertebrate or an invertebrate. A subject can be a laboratory animal. A subject can be a patient. A subject can be suffering from a disease. A subject can display symptoms of a disease. A subject may not display symptoms of a disease, but still have a disease. A subject can be under medical care of a caregiver (e.g., the subject is hospitalized and is treated by a physician).

### Methods of Treatment or Detection

[0140] In some aspects, the present disclosure provides for methods of treatment using an rAAV virion having any one of the engineered AAV VP capsid polypeptide sequences disclosed herein. In some aspects, the present disclosure provides for methods of detection using an rAAV virion having any one of the engineered AAV VP capsid polypeptide sequences disclosed herein. A method of treatment may comprise administering to a subject an effective amount of a pharmaceutical composition comprising rAAV virions assembled from VP polypeptides comprising a 581 to 589 region that confers tissue tropism or preference (e.g., ocular tissue tropism) to the rAAV. The rAAV virions may encapsidate any payload, including those payloads disclosed herein. For example, a method of treatment may comprise administering an effective amount of a pharmaceutical composition comprising rAAV virions assembled from VP polypeptides comprising a 581 to 589 region having a sequence of any one of SEQ ID NO: 14-SEQ ID NO: 2013 or SEQ ID NO: 2514-SEQ ID NO: 4513. In another example, a method of treatment may comprise administering an effective amount of a pharmaceutical composition comprising rAAV virions assembled from VP polypeptides comprising a 581 to 589 region having a sequence of any one of SEQ ID NO: 2014-SEQ ID NO: 2513 or SEQ ID NO: 4514-SEQ ID NO: 5013.

[0141] In some embodiments, the effective amount is at least 1×10⁸ viral genomes per dose. In some embodiments, the effective amount is at least 5×10⁸ viral genomes/dose, 7.5×10⁸ viral genomes/dose, at least 1×10⁹ viral genomes/dose, at least 2.5×10⁹ viral genomes/dose, at least 5×10⁹ viral genomes/dose. In some embodiments, an effective amount of an rAAV assembled from VP polypeptides comprising a 581 to 589 region conferring ocular tissue tropism or preference (e.g., retinal tissue tropism) may be lower than an effective amount of an AAV assembled from VP1, VP2, and VP3 polypeptides of SEQ ID NO: 1, SEQ ID NO: 10, and SEQ ID NO: 11, respectively.

[0142] In some embodiments, the effective amount is at least 1×10¹¹ viral genomes, at least 5×10¹¹ viral genomes, at least 1×10¹² viral genomes, at least 5×10¹² viral genomes, at least 1×10¹³ viral genomes, at least 1×10¹⁴ viral genomes, or at least 5×10¹⁴ viral genomes. In some embodiments, an effective amount of an rAAV assembled from VP polypeptides comprising a 581 to 589 region conferring ocular tissue tropism may be lower than an effective amount of an AAV assembled from VP1, VP2, and VP3 polypeptides of SEQ ID NO: 1, SEQ ID NO: 10, and SEQ ID NO: 11, respectively.

[0143] In some embodiments, the rAAV virion is administered via an ocular administration route, such as intravitreal administration, subconjunctival administration, retrobulbar administration, sub-retinal injection, topical mucosal administration, or intracameral administration. In some embodiments, the rAAV virion is administered via a systemic administration route including enteral routes of administration and parenteral routes of administration. The rAAV virion may be administered intravenously. In some embodiments, the rAAV may be administered intramuscularly. In some embodiments, the rAAV may be administered intraperitoneally. In some embodiments, the rAAV may be administered topically. In some embodiments, the rAAV may be administered orally. In particular embodiments, the rAAV virion is administered intravenously. In some embodiments, the rAAV is administered intrathecally. In some embodiments, the rAAV is administered by intracerebral ventricular injection. In some embodiments, the rAAV is administered by intracisternal magna administration. In some embodiments, the rAAV is administered by intravitreal injection.

[0144] In various embodiments, the patient suffers from one of the conditions listed in TABLE 1, below. In particular embodiments, the patient suffers from one of the conditions listed in TABLE 1 and the rAAV includes a payload comprising the transgene product associated therewith in TABLE 1. In some embodiments, an rAAV may be selected to specifically target the primary gene delivery target (e.g., the eye). For example, an rAAV selected to target the eye may comprise VP capsid polypeptides comprising a 581 to 589 region that confers ocular tissue tropism.

[0145] In some embodiments, an rAAV virion of the present disclosure, having any of the engineered AAV VP capsid polypeptide sequences disclosed herein, comprises a vector genome, the vector genome comprising a therapeutic polynucleotide or payload. In further embodiments, said payload may be under control of regulatory sequences that direct expression in infected human cells. In some embodiments, the payload may be under control of a cell type- or tissue type-specific promoter to direct expression in a target cell type or target tissue type. For example, expression of the payload may be under control of a retinal-specific promoter to promote retinal-specific expression, a retinal pigment epithelium-specific promoter to promote retinal pigment epithelium-specific expression, a choroid-specific promoter to promote choroid-specific expression, a photoreceptor-specific promoter to promote photoreceptor-specific expression, or an optic nerve-specific promoter to promote optic nerve-specific expression. In some embodiments, the payload comprises a therapeutic polynucleotide encoding any genetically encodable payload, such as an RNA (e.g., a guide RNA), a suppressor tRNA, a transgene, or a genome modifying entity.

[0146] In some embodiments, the therapeutic polynucleotide encodes a guide RNA, a tRNA, a suppressor tRNA, a siRNA, a miRNA, an mRNA, a shRNA, a circular RNA, or an antisense oligonucleotide (ASO), a ribozyme, a DNAzyme, an aptamer, or any combination thereof. In some embodiments, the therapeutic polynucleotide encodes a linear therapeutic polynucleotide or a circular therapeutic polynucleotide.

[0147] In some embodiments, the therapeutic polynucleotide is a transgene, encoding a therapeutic protein. In some embodiments, the therapeutic protein is an antibody that binds a target molecule (e.g., an anti-VEGF antibody that binds VEGF). In particular embodiments, the transgene encodes a protein selected from the targets suitable for modification or transgene products of TABLE 1. In some embodiments, the transgene encodes a protein that binds a target provided in TABLE 1. In some embodiments, the payload encodes a polynucleotide that targets a target provided in TABLE 1. In some embodiments, an ocular payload or a transgene encoding an ocular target is encapsidated by an rAAV comprising VP capsid polypeptides comprising a 581 to 589 region that confers ocular tissue tropism or preference.

TABLE 1
Suitable Therapeutic Targets or Payloads

| Condition | Payload or Target |
|---|---|
| 3-Methylglutaconic Aciduria, Type Iii | AFG3L2, MECR, OPA1 |
| Abetalipoproteinemia | MTTP |
| Abnormal Threshold of Rods | HBA2, PROC |
| Aceruloplasminemia | CP |
| Achromatopsia | ATF6, CABP4, CNGA3, CNGB3, PDE6C |
| Achromatopsia 3 | CNGB3 |
| Achromatopsia 4 | GNAT2 |
| ad Retinitis Pigmentosa | NRL, RDH12, PRPH2 (RDS), RHO, RPGR, |
| | SNRNP200, NR2E3, IMPDH1, CRX, HK1, |
| | IMPDH2, SNRNP200, PRPF3, AGBL5 |
| Age-related macular degeneration | NOS2A, CFH, CF, C2, C3, C5A, CFB, |
| (AMD), e.g., wet AMD, or dry AMD | HTRA1/LOC, MMP-9, TIMP-3, SLC16A8, |
| | VEGFA, VEGFC, CD59, RHO |
| Aland Island Eye Disease | CACNA1F |
| Albinism | TYRP1 |
| Albinism, Ocular, Type I | GPR143 |
| Albinism, Oculocutaneous, Type Ia | TYR |
| Albinism, Oculocutaneous, Type Ii | MC1R, OCA2 |
| Alport Syndrome | COL4A3, COL4A4, COL4A5 |
| Alzheimer Disease, Familial, 1 | APP, GRN, PSEN1 |
| Amblyopia | CACNA1F |
| Amyotrophic Lateral Sclerosis 2, | ALS2 |
| Juvenile | |
| Anterior Segment Dysgenesis 2 | FOXE3 |
| Auditory Neuropathy and Optic | FDXR |
| Atrophy | |
| Autosomal Dominant Cerebellar | KAT6B |
| Ataxia | |
| Autosomal Dominant Congenital | SNRNP200 |
| Stationary Night Blindness | |
| Bardet-Biedl Syndrome | ARL6, BBS1, BBS10, BBS12, BBS2, BBS4, BBS5, |
| | BBS7, BBS9, CEP290, IFT172, MKKS, MKS1, |
| | SDCCAG8, TRIM32, TTC8, WDPCP |
| Bardet-Biedl Syndrome 1 | BBIP1, BBS1, BBS10, LZTFL1 |
| Bardet-Biedl Syndrome 13 | MKS1 |
| Bardet-Biedl Syndrome 17 | LZTFL1 |
| Bardet-Biedl Syndrome 2 | BBS2, MKKS |
| Bardet-Biedl Syndrome 3 | ARL6 |
| Bardet-Biedl Syndrome 5 | BBS5 |
| Bardet-Biedl Syndrome 8 | TTC8 |
| Bardet-Biedl Syndrome 9 | BBS9 |
| Bartter Syndrome, Type 3 | CLCNKB |
| Basal Laminar Drusen | CFH |
| Bestrophinopathy, Autosomal | BEST1 |
| Recessive | |
| Bietti Crystalline Corneoretinal | CYP4V2 |
| Dystrophy | |
| Blau Syndrome | NOD2 |
| Blue Cone Monochromacy | OPN1LW |
| Bohring-Opitz Syndrome | ASXL1 |
| Bosma Arhinia Microphthalmia | SMCHD1 |
| Syndrome | |
| Boucher-Neuhauser Syndrome | PNPLA6 |
| Branchiooculofacial Syndrome | EYA1, TFAP2A |
| Butterfly-Shaped Pigment Dystrophy | CTNNA1, PRPH2 |
| Cafe-Au-Lait Spots, Multiple | NF1 |
| Cataracts | GEMIN4, CYP51A1, RIC1, TAPT1, TAF1A, |
| | WDR87, APE1, MIP, Cx50/GJA3 and 8, CRYAA, |
| | CRYBB2, PRX, POLR3B, XRCC1, ZNF350, |
| | EPHA2, CRYGC |
| Cerebral Cavernous Malformation, | KRIT1, PDCD10 |
| Familial | |
| Cerebral Cavernous Malformations | CCM2, KRIT1 |
| Cerebral Cavernous Malformations 2 | CCM2 |
| Cerebral Cavernous Malformations 3 | KRIT1, PDCD10 |
| Cerebral Creatine Deficiency | GAMT |
| Syndrome 2 | |
| Cerebroretinal Microangiopathy with | CTC1 |
| Calcifications and Cysts 1 | |
| Ceroid Lipofuscinosis, Neuronal, 11 | GRN |
| Ceroid Lipofuscinosis, Neuronal, 3 | CLN3 |
| Ceroid Lipofuscinosis, Neuronal, 4 | CLN6 |
| Ceroid Lipofuscinosis, Neuronal, 6a | CLN5, CLN6, SMPD1, TPP1 |
| Ceroid Lipofuscinosis, Neuronal, 8, | CLN8 |
| Northern Epilepsy Variant | |
| Charge Syndrome | CHD7, PUF60 |
| Chorioretinal Scar | CHD7 |
| Choroidal Dystrophy, | PRPH2 |
| Central Areolar 2 | |
| Choroidal Dystrophy, | GUCY2D, PRPH2 |
| Central Areolar, 1 | |
| Choroideraemia | REP1 |
| Choroideremia | CHM, Rab escort protein |
| Cohen Syndrome | VPS13B |
| Coloboma of Iris | PRR12, TMEM67 |
| Coloboma of Macula | CDON, YAP1 |
| Coloboma, Ocular, Autosomal | SERPINA1 |
| Dominant | |
| Coloboma, Ocular, Autosomal | SALL2 |
| Recessive | |
| Colorblindness, Partial, Protan Series | OPN1LW |
| Cone Dystrophy | UPF1 |
| Cone Dystrophy 4 | PDE6C |
| Cone-Rod Dystrophy 15 | CDHR1 |
| Cone-Rod Dystrophy 2 | CABP4, CEP290, CERKL, CRB1, CRX, DRAM2, |
| | FAM161A, GUCY2D, PROM1, PRPH2, RPGR, |
| | TTLL5, USH2A |
| Cone-Rod Dystrophy 22 | TLCD3B |
| Cone-Rod Dystrophy 3 | ABCA4 |
| Cone-Rod Dystrophy 6 | ABCA4, ABHD12, CABP4, CERKL, CNGA3, |
| | GUCY2D, KCNV2, NMNAT1, SAG, SRD5A3, |
| | WDR19 |
| Cone-Rod Dystrophy 9 | ADAM9 |
| Congenital Dyserythropoietic Anemia | PNPLA1, TGM1 |
| Congenital Ptosis | FBN1 |
| Congenital Retinal Arteriovenous | MITF, MYO15A, USH2A |
| Communication | |
| Congenital Stationary Night Blindness | ABCA4, CABP4, CACNA1F, GRK1, NYX, |
| | PDE6B, TRPM1 |
| Contractural Arachnodactyly, | FBN2 |
| Congenital | |
| Corpus Callosum, Agenesis of | ARID1B, CDH2, CREBBP, DCC |
| D-Bifunctional Protein Deficiency | HSD17B4 |
| Deafness, Autosomal Recessive 18a | USH1C |
| Deafness, Autosomal Recessive 2 | MYO7A |
| Deafness, Autosomal Recessive 31 | WHRN |
| Diabetes and Deafness, Maternally | MT-TE, MT-TL1 |
| Inherited | |
| Donnai-Barrow Syndrome | LRP2 |
| Duchenne and Becker Muscular | DMD |
| Dystrophy | |
| Dyskeratosis Congenita | CTC1, RTEL1, TERC, TERT, TINF2 |
| Ectopia Lentis 2, Isolated, Autosomal | ADAMTSL4 |
| Recessive | |
| Enhanced S-Cone Syndrome | NR2E3, NRL |
| Exudative Vitreoretinopathy | FZD4, LRP5, RCBTB1, ZNF408 |
| Exudative Vitreoretinopathy 4 | LRP5 |
| Exudative Vitreoretinopathy 5 | TSPAN12 |
| Exudative Vitreoretinopathy 7 | CTNNB1 |
| Familial Retinoblastoma | RB1 |
| Focal Dermal Hypoplasia | PORCN |
| Fundus Albipunctatus | PRPH2, RDH5, RHO, RLBP1 |
| Fundus Dystrophy | ABCA4, ABHD12, ADGRV1, AHI1, AIPL1, |
| | ALMS1, ARL2BP, BBS1, BBS10, BBS12, BBS2, |
| | BBS9, BEST1, C1QTNF5, CABP4, CACNA1F, |
| | CC2D2A, CDH23, CDH3, CDHR1, CDKL5; RS1, |
| | CEP290, CEP78, CERKL, CFAP410, CHM, CLN3, |
| | CLRN1, CNGA1, CNGA3, CNGB1, CNGB3, |
| | COL18A1, COL2A1, CRB1, CRX, CYP4V2, |
| | DRAM2, EYS, FAM161A, FLVCR1, FRMD7, |
| | GRM6, GUCY2D, HGSNAT, HK1, IFT140, |
| | IFT172, IMPG1, IMPG2, INPP5E, IQCB1, KCNV2, |
| | KIF11, KIZ, LCA5, LRAT, LRP5, MERTK, MFRP, |
| | MYO7A, NMNAT1, NPHP4, NR2E3, NRL, OAT, |
| | OPA1, PCARE, PCDH15, PDE6A, PDE6B, PDE6C, |
| | PEX1, PRCD, PROM1, PRPF31, PRPF8, PRPH2, |
| | RBP3, RDH12, RDH5, RHO, RLBP1, RP1, RP1L1, |
| | RP2, RPE65, RPGR, RPGRIP1, RS1, SAG, |
| | SLC24A1, SNRNP200, SPATA7, TOPORS, |
| | TTLL5, TULP1, USH2A |
| Glaucoma | CALM2, MPP-7, Optineurin, LOX1, CYP1B1, |
| | CAV1/2, MYOC, PITX2, FOXC1, PAX6, CYP1B1, |
| | LTBP2 |
| Glaucoma 1, Open Angle, F | ASB10, OPTN |
| Glaucoma 3, Primary Congenital, a | CYP1B1 |
| Glaucoma, Primary Open Angle | LTBP2, MYOC, OPTN |
| Glucocorticoid Deficiency 4 with or | NNT |
| Without Mineralocorticoid Deficiency | |
| Glycogen Storage Disease Iv | GBE1 |
| Gm1 Gangliosidosis | GLB1 |
| Gyrate Atrophy of Choroid and Retina | OAT, RIMS1 |
| Hemophagocytic | UNC13D |
| Lymphohistiocytosis, Familial, 3 | |
| Hereditary Spastic Paraplegia | ALDH18A1, AP4B1, AP4M1, AP5Z1, ATL1, |
| | CYP2U1, CYP7B1, DDHD2, FA2H, GBA2, KIF1C, |
| | NIPA1, PNPLA6, POLG, REEP1, SACS, SPAST, |
| | SPG11, SPG21, SPG7, ZFYVE26 |
| Hermansky-Pudlak Syndrome | BLOC1S6, HPS1, HPS3, HPS4, HPS5, HPS6, |
| | RUNX1 |
| Hermansky-Pudlak Syndrome 8 | BLOC1S3 |
| Heterochromia Iridis | MITF |
| Hyperornithinemia- | SLC25A15 |
| Hyperammonemia-Homocitrullinuria | |
| Syndrome | |
| Iminoglycinuria | SLC36A2 |
| Incontinentia Pigmenti | IKBKG |
| Inherited Retinal Disorder | VPS13B |
| Intraocular Pressure Quantitative Trait | ZEB1 |
| Locus | |
| Isolated Ectopia Lentis | FBN1 |
| Jalili Syndrome | CNNM4 |
| Joubert Syndrome 3 | AHI1 |
| Juvenile Retinoschisis | ATP1A3 |
| Kearns-Sayre Syndrome | MT-TL1, MT-TY |
| Keratitis, Neurotrophic | NGF |
| Keratoconjunctivitis, Atopic | |
| Keratoconjunctivitis, Vernal | |
| Keratomalacia | CEP290 |
| Knobloch Syndrome | COL18A1 |
| Kufor-Rakeb Syndrome | ATP13A2 |
| Late-Onset Retinal Degeneration | C1QTNF5 |
| Leber congenital amaurosis (LCA) | RPE65, GUCY2D, KIR7.1 |
| Leber Congenital Amaurosis 1 | CRB1, GUCY2D, LCA5, RPGRIP1, TULP1 |
| Leber Congenital Amaurosis 10 | CEP290 |
| Leber Congenital Amaurosis 12 | RD3 |
| Leber Congenital Amaurosis 13 | RDH12 |
| Leber Congenital Amaurosis 14 | LRAT |
| Leber Congenital Amaurosis 15 | TULP1 |
| Leber Congenital Amaurosis 16 | KCNJ13 |
| Leber Congenital Amaurosis 17 | GDF6 |
| Leber Congenital Amaurosis 19 | USP45 |
| Leber Congenital Amaurosis 2 | RPE65 |
| Leber Congenital Amaurosis 3 | SPATA7 |
| Leber Congenital Amaurosis 4 | AIPL1 |
| Leber Congenital Amaurosis 5 | LCA5 |
| Leber Congenital Amaurosis 6 | RPGRIP1 |
| Leber Congenital Amaurosis 7 | CRX |
| Leber Congenital Amaurosis 8 | CRB1 |
| Leber Congenital Amaurosis 9 | NMNAT1 |
| Leber hereditary optic neuropathy | ND4, MT-ND1 |
| (LHON) | |
| Leber Hereditary Optic Neuropathy, | MT-ATP6, MT-ND1, MT-ND2, MT-ND4, MT- |
| Modifier of | ND4L, MT-ND5, MT-ND6, NDUFS2 |
| Leber Plus Disease | ABCA4, AHI1, AIPL1, ALMS1, CEP290, CRB1, |
| | GRM6, GUCY2D, INPP5E, IQCB1, LCA5, LRAT, |
| | NDUFAF5, NMNAT1, PDE6B, PEX1, RDH12, |
| | RP2, RPE65, RPGRIP1, SLC38A8, SPATA7, |
| | TULP1, USH2A |
| Liberfarb Syndrome | PISD |
| Long-Chain 3-Hydroxyacyl-Coa | HADHA, HADHB, HMGCL |
| Dehydrogenase Deficiency | |
| Macular Degeneration, Age-Related, | CFI |
| 13 | |
| Macular Degeneration, Age-Related, | ABCA4, MT-TL1 |
| 2 | |
| Macular Degeneration, diabetic | VEGFA, VEGFC |
| Macular Degeneration, Oedema | VEGFA, VEGFC |
| Macular Dystrophy, Patterned, 1 | PRPH2 |
| Macular Dystrophy, Vitelliform, 2 | BEST1, IMPG2, PRPH2 |
| Macular Dystrophy, Vitelliform, 3 | PRPH2 |
| Macular Dystrophy, Vitelliform, 4 | IMPG1 |
| Macular Dystrophy, Vitelliform, 5 | IMPG2 |
| Marfan Syndrome | FBN1, TGFBR2, MTHFR, MTR, MTRR |
| Maturity-Onset Diabetes of the Young | APPL1, GCK, HNF1A, HNF1B, KCNJ11, MLKL |
| Melanoma, Uveal | SF3B1 |
| Mental Retardation, Truncal Obesity, | INPP5E |
| Retinal Dystrophy, and Micropenis | |
| Syndrome | |
| Methylmalonic Acidemia with | MMACHC |
| Homocystinuria | |
| Microcephaly and Chorioretinopathy, | TUBGCP6 |
| Autosomal Recessive, 1 | |
| Microcephaly and Chorioretinopathy, | TUBGCP4 |
| Autosomal Recessive, 3 | |
| Microcephaly with or Without | KIF11 |
| Chorioretinopathy, Lymphedema, or | |
| Mental Retardation | |
| Microphthalmia | ALDH1A3 |
| Microphthalmia, Isolated 2 | VSX2 |
| Microphthalmia, Isolated 3 | RAX |
| Microphthalmia, Isolated 5 | MFRP |
| Microphthalmia, Isolated 7 | GDF3 |
| Microphthalmia, Isolated, with | RBP4 |
| Coloboma 10 | |
| Microphthalmia, Isolated, with | SHH |
| Coloboma 5 | |
| Microphthalmia, Isolated, with | GDF6 |
| Coloboma 6 | |
| Microphthalmia, Isolated, with | ABCB6 |
| Coloboma 7 | |
| Microphthalmia, Isolated, with | TENM3 |
| Coloboma 9 | |
| Microphthalmia, Syndromic 9 | STRA6, WNT7B |
| Mrcs Syndrome | BEST1 |
| Mucolipidosis Iv | MCOLN1 |
| Multiple Congenital Anomalies- | PIGT |
| Hypotonia-Seizures Syndrome 3 | |
| Muscular Dystrophy, Becker Type | DMD |
| Muscular Dystrophy- | POMGNT1 |
| Dystroglycanopathy, Type a, 3 | |
| Muscular Dystrophy- | POMGNT1 |
| Dystroglycanopathy, Type B, 3 | |
| Muscular Dystrophy- | POMGNT1 |
| Dystroglycanopathy, Type C, 3 | |
| Myeloperoxidase Deficiency | MPO |
| Myopia | HGF, C-MET, UMODL1, MMP-1/2, PAX6, CBS, |
| | MTHFR, IGF-1, UHRF1BPIL, PTPRR, PPFIA2, |
| | P4HA2 |
| Myopia 2, Autosomal Dominant | CNP |
| Myopia 21, Autosomal Dominant | ZNF644 |
| Myopia 24, Autosomal Dominant | SLC39A5 |
| Myopia 25, Autosomal Dominant | P4HA2 |
| Myopia 26, X-Linked, Female- | ARR3 |
| Limited | |
| Myopia 27, Autosomal Dominant | CPSF1 |
| Myopia 6 | NCAPH2; SCO2; TYMP, TYMP; NCAPH2; SCO2 |
| Myotonia Congenita, Autosomal | CLCN1 |
| Recessive | |
| Neonatal Adrenoleukodystrophy | PEX1 |
| Neurofibromatosis, Type Ii | NF2 |
| Neuronal Ceroid Lipofuscinosis | CLN3, CLN5, CLN6, CLN8, CTSD, PPT1, TPP1 |
| Neuronal Ceroid-Lipofuscinoses | PPT1 |
| Neuroocular Syndrome | PRR12 |
| Neuropathy, Ataxia, and Retinitis | MT-ATP6 |
| Pigmentosa | |
| Neuropathy, Ischaemic Optic | |
| Nevus of Ota | HRAS |
| Newfoundland Rod-Cone Dystrophy | RLBP1 |
| Night Blindness, Congenital | RHO |
| Stationary, Autosomal Dominant 1 | |
| Night Blindness, Congenital | GPR179 |
| Stationary, Type 1e | |
| Night Blindness, Congenital | CACNA1F |
| Stationary, Type 2a | |
| Nonsyndromic Hearing Loss | GJB2, GJB3, GJB6, SOHLH1 |
| Noonan Syndrome with Multiple | PTPN11, RAF1 |
| Lentigines | |
| Norrie Disease | NDP |
| Oculocutaneous Albinism | SLC24A5, TYR |
| Oculocutaneous Albinism, Type Viii | DCT |
| Oguchi Disease 1 | SAG |
| Oliver-Mcfarlane Syndrome | PNPLA6 |
| Opitz Gbbb Syndrome | MID1, SPECC1L |
| Optic Atrophy 1 | MT-ATP8 |
| Optic Atrophy 10 with or Without | RTN4IP1 |
| Ataxia, Mental Retardation, and | |
| Seizures | |
| Optic Atrophy 12 | AFG3L2 |
| Optic Atrophy 13 with Retinal and | SSBP1 |
| Foveal Abnormalities | |
| Optic Atrophy 3, Autosomal | DNAJC19, MT-ND1, OPA3 |
| Dominant | |
| Optic Atrophy 7 with or Without | TMEM126A |
| Auditory Neuropathy | |
| Optic Atrophy 9 | ACO2 |
| Optic Atrophy with or Without | OPA1 |
| Deafness, Ophthalmoplegia, | |
| Myopathy, Ataxia, and Neuropathy | |
| Optic Nerve Glioma | NF1 |
| Optic Nerve Hypoplasia, Bilateral | ATOH7, COL4A1, PAX6 |
| Optical Neuropathy | Complex I or ND genes, OPA1, RPE65 |
| Osteopetrosis, Autosomal Recessive 3 | CA2 |
| Osteoporosis-Pseudoglioma | LRP5 |
| Syndrome | |
| Papillorenal Syndrome | PAX2 |
| Pathologic Nystagmus | CEP290 |
| Pendred Syndrome | FOXI1, SLC26A4 |
| Peroxisomal Disease | PEX1 |
| Persistent Hyperplastic Primary | ATOH7 |
| Vitreous, Autosomal Recessive | |
| Pigmented Paravenous Chorioretinal | CRB1, MT-TH, PRPH2 |
| Atrophy | |
| Polypoidal Choroidal Vasculopathy | C2, C3, CFH, SERPING1, PEDF, ARMS2-HTRA1, |
| | FGD6, ABCG1, LOC387715, CETP |
| Posterior Column Ataxia with | FLVCR1 |
| Retinitis Pigmentosa | |
| Primary Congenital Glaucoma | CYP1B1 |
| Primary Hyperoxaluria | AGXT, GRHPR |
| Progressive External Ophthalmoplegia | MT-TL1, POLG |
| with Mitochondrial Dna Deletions, | |
| Autosomal Dominant 1 | |
| Progressive External Ophthalmoplegia | SLC25A4 |
| with Mitochondrial Dna Deletions, | |
| Autosomal Dominant 2 | |
| Progressive External Ophthalmoplegia | TWNK |
| with Mitochondrial Dna Deletions, | |
| Autosomal Dominant 3 | |
| Progressive External Ophthalmoplegia | POLG2 |
| with Mitochondrial Dna Deletions, | |
| Autosomal Dominant 4 | |
| Progressive External Ophthalmoplegia | POLG, TWNK |
| with Mitochondrial Dna Deletions, | |
| Autosomal Recessive 1 | |
| Progressive Myoclonus Epilepsy | CSTB, EPM2A, GOSR2, SCARB2 |
| Proliferative Vasculopathy and | FLVCR2 |
| Hydranencephaly-Hydrocephaly | |
| Syndrome | |
| Prolonged Electroretinal Response | F2, KCNH2 |
| Suppression | |
| Pseudoxanthoma Elasticum | ABCC2, ABCC6 |
| Pyruvate Carboxylase Deficiency | PC |
| Rare Genetic Deafness | ACTG1, ADGRV1, ATP6V1B1, CDC14A, CDH23, |
| | CLRN1, COL4A5, DIAPH1, EDNRB, ESRRB, |
| | EYA1, GIPC3, GJB2, GPSM2, GRXCR1, KCNQ4, |
| | LOXHD1, LRTOMT, MARVELD2, MITF, |
| | MSRB3, MT-RNR1, MT-TS1, MYO15A, MYO6, |
| | MYO7A, OTOA, OTOF, OTOG, OTOGL, PAX3, |
| | PCDH15, PJVK, POU3F4, SERPINB6, SLC26A4, |
| | SOX10, STRC, SYNE4, TECTA, TMC1, |
| | TMPRSS3, USH1C, USH2A, WFS1, WHRN |
| Refsum Disease, Classic | PEX7, PHYH |
| Retinal Arterial Macroaneurysm with | IGFBP7 |
| Supravalvular Pulmonic Stenosis | |
| Retinal Arteries, Tortuosity of | COL4A1 |
| Retinal Cone Dystrophy 3b | KCNV2 |
| Retinal Dystrophy and Obesity | TUB |
| Retinal Dystrophy, Iris Coloboma, | RBP4 |
| and Comedogenic Acne Syndrome | |
| Retinal Vascular Occlusion | BBS9 |
| Retinitis | RLBP1 |
| Retinitis Pigmentosa | ABCA4, ADGRV1, AHI1, ALMS1, BBS1, |
| | BBS1; ZDHHC24, BBS2, BBS7, CACNA1F, CDH3, |
| | CDHR1, CEP290, CERKL, CHM, CLRN1, CNGA1, |
| | CNGB1, CRB1, EYS, FAM161A, FLVCR1, |
| | GUCY2D, HGSNAT, IFT140, IFT172, IMPG2, |
| | LCA5, MAK, MERTK, MYO7A, NR2E3, NRL, |
| | P3H2, PANK2, PCARE, PDE6A, PDE6B, PPT1, |
| | PRCD, PROM1, PRPF31, PRPF8, PRPH2, |
| | RCBTB1, RDH12, RHO, RLBP1, RP1, RP1L1, |
| | RP2, RPE65, RPGR, RPGRIP1, SLC24A1, |
| | SNRNP200, SPATA7, TTLL5, TULP1, USH2A, |
| | VPS13B, VSX2 |
| Retinitis Pigmentosa (RP, including | RLBP1 |
| RLBP1) | |
| Retinitis Pigmentosa 1 | RP1 |
| Retinitis Pigmentosa 10 | IMPDH1 |
| Retinitis Pigmentosa 11 | PRPF31 |
| Retinitis Pigmentosa 12 | CRB1 |
| Retinitis Pigmentosa 13 | PRPF8 |
| Retinitis Pigmentosa 14 | TULP1 |
| Retinitis Pigmentosa 19 | ABCA4 |
| Retinitis Pigmentosa 2 | RP2 |
| Retinitis Pigmentosa 20 | RPE65 |
| Retinitis Pigmentosa 23 | OFD1 |
| Retinitis Pigmentosa 25 | EYS |
| Retinitis Pigmentosa 26 | CERKL |
| Retinitis Pigmentosa 27 | NRL |
| Retinitis Pigmentosa 28 | FAM161A |
| Retinitis Pigmentosa 3 | RP2, RPGR |
| Retinitis Pigmentosa 33 | SNRNP200 |
| Retinitis Pigmentosa 36 | CYGB; PRCD, PRCD |
| Retinitis Pigmentosa 37 | NR2E3 |
| Retinitis Pigmentosa 38 | MERTK |
| Retinitis Pigmentosa 39 | USH2A |
| Retinitis Pigmentosa 4 | CFAP418, RHO |
| Retinitis Pigmentosa 40 | PDE6B, PDE6B; PDE6B-AS1 |
| Retinitis Pigmentosa 41 | PROM1 |
| Retinitis Pigmentosa 42 | KLHL7 |
| Retinitis Pigmentosa 43 | PDE6A |
| Retinitis Pigmentosa 45 | CNGB1 |
| Retinitis Pigmentosa 47 | SAG |
| Retinitis Pigmentosa 49 | CNGA1 |
| Retinitis Pigmentosa 54 | PCARE |
| Retinitis Pigmentosa 55 | ARL6 |
| Retinitis Pigmentosa 56 | IMPG2 |
| Retinitis Pigmentosa 59 | DHDDS |
| Retinitis Pigmentosa 6 | RPGR |
| Retinitis Pigmentosa 62 | MAK |
| Retinitis Pigmentosa 66 | RBP3 |
| Retinitis Pigmentosa 69 | KIZ |
| Retinitis Pigmentosa 7 | PRPH2 |
| Retinitis Pigmentosa 76 | POMGNT1 |
| Retinitis Pigmentosa 77 | REEP6 |
| Retinitis Pigmentosa 85 | AHR |
| Retinitis Pigmentosa 88 | RP1L1 |
| Retinitis Pigmentosa 90 | IDH3 A |
| Retinitis Pigmentosa 91 | ABCA4, CRX, IMPG1 |
| Retinitis Pigmentosa-Deafness | MT-TS2 |
| Syndrome | |
| Retinopathy (e.g., diabetic) | |
| Retinoschisis 1, X-Linked, Juvenile | CDKL5; RS1, RS1 |
| Revesz Syndrome | TINF2 |
| Rhizomelic Chondrodysplasia | GNPAT |
| Punctata, Type 2 | |
| Saul-Wilson Syndrome | COG4 |
| Senior-Loken Syndrome 1 | IQCB1, NPHP1, SDCCAG8, TRAF3IP1, WDR19 |
| Severe Early-Childhood-Onset Retinal | ABCA4, ALMS1 |
| Dystrophy | |
| Short Stature, Optic Nerve Atrophy, | NBAS |
| and Pelger-Huet Anomaly | |
| Short-Rib Thoracic Dysplasia 5 with | WDR19 |
| or Without Polydactyly | |
| Short-Rib Thoracic Dysplasia 9 with | IFT140 |
| or Without Polydactyly | |
| Sjogren-Larsson Syndrome | ALDH3A2 |
| Spastic Ataxia, Charlevoix-Saguenay | SACS |
| Type | |
| Spastic Paraplegia 15, Autosomal | ZFYVE26 |
| Recessive | |
| Spondylometaphyseal Dysplasia, | CFAP410 |
| Axial | |
| Stargardt disease | ABCA1, ABCA4, CRB1 |
| Stargardt Disease | ABCA4, BEST1, COL2A1, CRB1, CRX, PRPH2, |
| | TULP1 |
| Stargardt Disease 3 | ELOVL4 |
| Stickler Syndrome | COL9A2 |
| Stickler Syndrome, Type I, | COL2A1 |
| Nonsyndromic Ocular | |
| Sveinsson Chorioretinal Atrophy | SEMA4A |
| Syndromic Rod-Cone Dystrophy | EPG5, KIF11 |
| Tay-Sachs Disease | HEXA |
| Temtamy Syndrome | C12orf57 |
| Tetrahydrobiopterin Deficiency | ATP1A3 |
| Tietz Albinism-Deafness Syndrome | MITF |
| Tumoral Calcinosis, | FGF23 |
| Hyperphosphatemic, Familial, 1 | |
| Usher Syndrome | ADGRV1, CEP250, CLRN1, MYO7A, PROM1, |
| | USH1C, USH1G, USH2A |
| Usher Syndrome 2A | USH2A |
| Usher Syndrome Type 2 | ADGRV1, CDH23, USH2A |
| Usher Syndrome, Type I | CDH23, MYO7A, PCDH15, USH1C |
| Usher Syndrome, Type I (USH1) | MYO7A |
| Usher Syndrome, Type Ic | USH1C |
| Usher Syndrome, Type Id | CDH23, PCDH15 |
| Usher Syndrome, Type if | PCDH15 |
| Usher Syndrome, Type Ig | PCDH15, USH1G |
| Usher Syndrome, Type Iia | USH2A |
| Usher Syndrome, Type lic | ADGRV1 |
| Usher Syndrome, Type Iid | WHRN |
| Usher Syndrome, Type Iiia | CLRN1 |
| Usher Syndrome, Type Iv | ARSG |
| Uveal Melanoma | PTEN, BAP1, GNAQ, GNA11, DDEF1, SF3B1, |
| | EIF1AX, CDKN2A, p14ARF, HERC2/OCA2 |
| Uveitis | |
| Vascular Dementia | HTRA1, NOTCH3 |
| Vasculopathy, Retinal, with Cerebral | TREX1 |
| Leukoencephalopathy and Systemic | |
| Manifestations | |
| Von Hippel-Lindau Syndrome | VHL |
| Wagner Vitreoretinopathy | VCAN |
| Walker-Warburg Syndrome | FKRP, FKTN, POMT1 |
| Weaver Syndrome | EZH2 |
| Wet AMD | Anti-VEGF antibody |
| Wet AMD, Dry AMD | NRP1 |
| X-linked retinitis pigmentosa (X- | RPGR |
| linked RP) | |
| X-linked Retinoschisis | RS1 |

[0148] In some embodiments, the therapeutic polynucleotide encodes a therapeutic RNA. In some embodiments the therapeutic polynucleotide encodes an RNA, such as a guide RNA (including an engineered or synthetic guide RNA) for genome editing or for RNA editing. The guide RNA may target a gene, such as those provided in TABLE 1 or encoding a protein nucleotide provided in TABLE 1, to promote editing of the target gene. In some embodiments, editing of the target gene may treat a condition in a subject, such as a condition provided in TABLE 1.

[0149] In some embodiments, the therapeutic polynucleotide encodes a tRNA or a modified tRNA (engineered or synthetic tRNA). For example, the tRNA or modified tRNA can be a suppressor tRNA. The suppressor tRNA can be engineered to have an anticodon region that recognizes a stop codon, such as any premature stop codon (opal, ochre, or amber stop codons). A suppressor tRNA may target a premature stop codon in a gene, such as those provided in TABLE 1 or encoding a protein nucleotide provided in TABLE 1, to promote readthrough of the gene. In some embodiments, suppressing the premature stop codon may treat a condition in a subject, such as a condition provided in TABLE 1.

[0150] In some embodiments, the therapeutic polynucleotide (e.g., a therapeutic RNA, a tRNA, or a genome modifying entity) can target a gene listed in TABLE 1 or any gene associated with an ocular disease, such as achromatopsia, macular degeneration (e.g., wet AMD or dry AMD), cataracts, choroideremia, glaucoma, optical neuropathy, Marfan syndrome, myopia, polypoidal choroidal vasculopathy, retinitis pigmentosa, Stargardt disease, Usher syndrome, Leber congenital amaurosis, Leber hereditary optical neuropathy, Uveal melanoma, or X-linked retinoschisis, or any genetic disease affecting an ocular tissue. In some embodiments, the targeted gene may be CNGB3, NOS2A, CFH, CF, C2, C3, CFB, HTRA1/LOC, MMP-9, TIMP-3, SLC16A8, GEMIN4, CYP51A1, RIC1, TAPT1, TAF1A, WDR87, APE1, MIP, Cx50/GJA3 and 8, CRYAA, CRYBB2, PRX, POLR3B, XRCC1, ZNF350, EPHA2, REP1, CALM2, MPP-7, Optineurin, LOX1, CYP1B1, CAV1/2, MYOC, PITX2, FOXC1, PAX6, LTBP2, Complex I or ND genes, OPA1, RPE65, FBN1, TGFBR2, MTHFR, MTR, MTRR, HGF, C-MET, UMODL1, MMP-1/2, CBS, IGF-1, UHRF1BP1L, PTPRR, PPFIA2, P4HA2, SERPING1, PEDF, ARMS2-HTRA1, FGD6, ABCG1, LOC387715, CETP, NRL, RDH12, PRPH2 (RDS), RHO, RPGR, NR2E3, IMPDH1, CRX, HK1, IMPDH2, SNRNP200, PRPF3, AGBL5, ABCA1, ABCA4, CRB1, USH2A, NRP1, ND4, RLBP1, PTEN, BAP1, GNAQ, GNA11, DDEF1, SF3B1, EIF1AX, CDKN2A, p14ARF, HERC2/OCA2, VEGF, RS1, a fragment any of these, or any combination thereof. In some embodiments, the therapeutic polynucleotide is a gene therapy payload (e.g., a transgene) and, thus, may itself be one of the genes listed in TABLE 1 or any gene associated with an ocular disease, such as achromatopsia, macular degeneration (e.g., wet AMD or dry AMD), cataracts, choroideremia, glaucoma, optical neuropathy, Marfan syndrome, myopia, polypoidal choroidal vasculopathy, retinitis pigmentosa, Stargardt disease, Usher syndrome, Leber congenital amaurosis, Leber hereditary optical neuropathy, Uveal melanoma, or X-linked retinoschisis, or any genetic disease. In some embodiments, the transgene may be CNGB3, NOS2A, CFH, CF, C2, C3, CFB, HTRA1/LOC, MMP-9, TIMP-3, SLC16A8, GEMIN4, CYP51A1, RIC1, TAPT1, TAF1A, WDR87, APE1, MIP, Cx50/GJA3 and 8, CRYAA, CRYBB2, PRX, POLR3B, XRCC1, ZNF350, EPHA2, REP1, CALM2, MPP-7, Optineurin, LOX1, CYP1B1, CAV1/2, MYOC, PITX2, FOXC1, PAX6, LTBP2, Complex I or ND genes, OPA1, RPE65, FBN1, TGFBR2, MTHFR, MTR, MTRR, HGF, C-MET, UMODL1, MMP-1/2, CBS, IGF-1, UHRF1BP1L, PTPRR, PPFIA2, P4HA2, SERPING1, PEDF, ARMS2-HTRA1, FGD6, ABCG1, LOC387715, CETP, NRL, RDH12, PRPH2 (RDS), RHO, RPGR, NR2E3, IMPDH1, CRX, HK1, IMPDH2, SNRNP200, PRPF3, AGBL5, ABCA1, ABCA4, CRB1, USH2A, NRP1, ND4, RLBP1, PTEN, BAP1, GNAQ, GNA11, DDEF1, SF3B1, EIF1AX, CDKN2A, p14ARF, HERC2/OCA2, VEGF, RS1, a fragment any of these, or any combination thereof. In some embodiments, the transgene may encode a protein that targets a gene, a protein, or a protein encoded by a gene provided in TABLE 1, a fragment any of these, or any combination thereof.

[0151] An engineered AAV comprising a VP capsid polypeptide comprising an ocular tissue-tropic 581 to 589 region may be used to deliver a payload to treat an ocular condition, or a condition of the eye. For example, an engineered AAV comprising a VP capsid polypeptide comprising a 581 to 589 region conferring ocular tissue tropism may be used to treat an ocular condition (e.g., achromatopsia, macular degeneration (e.g., wet AMD or dry AMD), cataracts, choroideremia, glaucoma, optical neuropathy, Marfan syndrome, myopia, polypoidal choroidal vasculopathy, retinitis pigmentosa, Stargardt disease, Usher syndrome, Leber congenital amaurosis, Leber hereditary optical neuropathy, Uveal melanoma, or X-linked retinoschisis). The 581 to 589 region of the VP capsid polypeptide may have a sequence of any one of SEQ ID NO: 14-SEQ ID NO: 2013, SEQ ID NO: 2514-SEQ ID NO: 4513, SEQ ID NO: 2014-SEQ ID NO: 2513, or SEQ ID NO: 4514-SEQ ID NO: 5013. In some embodiments, the engineered AAV comprising a VP capsid polypeptide comprising an ocular tissue-tropic 581 to 589 region may be used to deliver a transgene encoding a protein associated with an ocular condition or that targets a protein associated with an ocular condition (e.g., a protein encoded by CNGB3, NOS2A, CFH, CF, C2, C3, CFB, HTRA1/LOC, MMP-9, TIMP-3, SLC16A8, GEMIN4, CYP51A1, RIC1, TAPT1, TAF1A, WDR87, APE1, MIP, Cx50/GJA3 and 8, CRYAA, CRYBB2, PRX, POLR3B, XRCC1, ZNF350, EPHA2, REP1, CALM2, MPP-7, Optineurin, LOX1, CYP1B1, CAV1/2, MYOC, PITX2, FOXC1, PAX6, LTBP2, Complex I or ND genes, OPA1, RPE65, FBN1, TGFBR2, MTHFR, MTR, MTRR, HGF, C-MET, UMODL1, MMP-1/2, CBS, IGF-1, UHRF1BP1L, PTPRR, PPFIA2, P4HA2, SERPING1, PEDF, ARMS2-HTRA1, FGD6, ABCG1, LOC387715, CETP, NRL, RDH12, PRPH2 (RDS), RHO, RPGR, NR2E3, IMPDH1, CRX, HK1, IMPDH2, SNRNP200, PRPF3, AGBL5, ABCA1, ABCA4, CRB1, USH2A, NRP1, ND4, RLBP1, PTEN, BAP1, GNAQ, GNA11, DDEF1, SF3B1, EIF1AX, CDKN2A, p14ARF, HERC2/OCA2, VEGF, RS1). For example, an engineered AAV comprising a VP capsid polypeptide comprising a retina tissue-tropic 581 to 589 region (e.g., any one of SEQ ID NO: 14-SEQ ID NO: 2013 or SEQ ID NO: 2514-SEQ ID NO: 4513) may be used to deliver a payload encoding a therapeutic protein associated with retinitis pigmentosa (e.g., NRL, RDH12, PRPH2 (RDS), RHO, RPGR, SNRNP200, NR2E3, IMPDH1, CRX, HK1, IMPDH2, SNRNP200, PRPF3, or AGBL5) to retina tissue to treat retinitis pigmentosa. In another example, an engineered AAV comprising a VP capsid polypeptide comprising an RPE tissue-tropic 581 to 589 region (e.g., any one of SEQ ID NO: 2014-SEQ ID NO: 2513 or SEQ ID NO: 4514-SEQ ID NO: 5013) may be used to deliver a payload encoding a therapeutic protein associated with dry age-related macular degeneration to RPE tissue to treat dry age-related macular degeneration.

[0152] In some embodiments, the therapeutic polynucleotide encodes genome modifying entities. For example, a genome modifying entity may be a DNA editing enzyme, an RNA editing enzyme, a transcriptional activator, or a transcriptional repressor. The DNA editing enzyme may be any DNA editing enzyme, including any CRISPR/Cas systems, meganucleases, zinc-finger nucleases, (ZFNs), TALE Nucleases (TALENs and megaTALENS). The CRISPR/Cas system can be a Cas3, Cas8, Cas10, Cas9, Cas4, Cas12, or Cas13. The RNA editing enzyme may be ADAR. In some embodiments, the ADAR is a human ADAR1 or human ADAR2. The transcriptional activator may be VP64. A transcriptional repressor may be KRAB. Such genome modifying entities may target any gene listed in TABLE 1 for editing.

[0153] In some embodiments, the present disclosure provides for rAAV virions having an engineered AAV VP capsid polypeptide (e.g., comprising a 581 to 589 region variant), where the virion encapsidates any one of or any combination of the therapeutic payloads disclosed herein. In some embodiments, multiple copies of the therapeutic payload are encapsidated. The 581 to 589 region of the engineered AAV VP capsid polypeptide may have a sequence of any one of SEQ ID NO: 14-SEQ ID NO: 2013, SEQ ID NO: 2514-SEQ ID NO: 4513, SEQ ID NO: 2014-SEQ ID NO: 2513, or SEQ ID NO: 4514-SEQ ID NO: 5013.

[0154] In some embodiments, the therapeutic polynucleotide is a polynucleotide capable of serving as a homology template for homology-directed repair. In some embodiments, the therapeutic polynucleotide may be a guide polynucleotide for a CRISPR/Cas system or an ADAR enzyme. For example, the therapeutic polynucleotide may be a CRISPR/Cas guide RNA or an ADAR guide RNA.

[0155] In some embodiments, an rAAV virion of the present disclosure, having any of the engineered AAV VP capsid polypeptide sequences disclosed herein, comprises a vector genome, the vector genome comprising a detectable polynucleotide or payload. In further embodiments, said payload may be under control of regulatory sequences that direct expression in infected human cells. In some embodiments, the payload may be under control of a cell type- or tissue type-specific promoter to direct expression in a target cell type or target tissue type. For example, expression of the payload may be under control of a retinal-specific promoter to promote retinal-specific expression, a retinal pigment epithelium-specific promoter to promote retinal pigment epithelium-specific expression, a choroid-specific promoter to promote choroid-specific expression, a photoreceptor-specific promoter to promote photoreceptor-specific expression, or an optic nerve-specific promoter to promote optic nerve-specific expression. Examples of detectable polynucleotides include, but are not limited to, any genetically encodable detectable moiety. For example, a genetically encodable detectable moiety may be a fluorescent protein such as EGFP, GFP, YFP, RFP, CFP, or any variants thereof. In some embodiments, the present disclosure provides for rAAV virions having an engineered AAV VP capsid polypeptide, where the virion encapsidates any one of or any combination of the detectable payloads disclosed herein. In some embodiments, multiple copies of the detectable payload are encapsidated.

[0156] In some embodiments, the present disclosure provides for rAAV virions having an engineered AAV VP capsid polypeptide, where the virion encapsidates any one of or any combination of the therapeutic payloads and detectable payloads disclosed herein. For example, an rAAV of the present disclosure having an engineered AAV VP capsid polypeptide may encapsidate a transgene and a fluorescent protein. As another example, an rAAV of the present disclosure having an engineered AAV VP capsid polypeptide may encapsidate a therapeutic RNA (e.g., a guide RNA) and a fluorescent protein.

[0157] Delivering a payload (e.g., a payload encoding a therapeutic polypeptide or a therapeutic polynucleotide) using the ocular tissue specific AAVs described herein may produce lower toxicity in a subject compared to non-specific AAVs (e.g., AAVs comprising a VP1 polypeptide of SEQ ID NO: 1). Tissue specific AAVs (e.g., ocular tissue specific AAVs) may be effective at lower doses compared to non-specific AAVs since a larger fraction of the administered AAVs infect the relevant tissue (e.g., ocular tissue). As a result, a therapeutically effective dose of tissue specific AAVs may be lower than a therapeutically effective dose of non-specific AAVs, leading to lower toxicity due administering a lower dose. For example, administration of a therapeutically effective dose of tissue specific AAVs may result in lower liver toxicity than administration of a therapeutically effective dose of non-specific AAVs. Administration of a lower dose may also lead to lower production of neutralizing antibodies in the subject. Neutralizing antibodies may decrease the efficacy of the AAV therapy by inhibiting infection of the target tissue or may cause severe side effects in the subject due to the immune response. Additionally, tissue specific AAVs (e.g., ocular tissue specific) may produce fewer off-target effects compared to non-specific AAVs when administered at the same dose since fewer of the AAVs infect off target tissues (e.g., non-targeted ocular tissues such as aqueous humor or vitreous humor). Off-target effects may include increased gene expression in an off-target tissue, decreased gene expression in an off-target tissue, gene editing in an off-target tissue, immune response, or liver toxicity.

### In Vivo Selected VP Polypeptides

[0158] In a further aspect, engineered (synonymously, recombinant) adeno-associated virus (AAV) VP capsid polypeptides identified using the methods described herein are provided.

[0159] In some embodiments, the engineered adeno-associated virus (AAV) viral protein (VP) capsid polypeptide has an amino acid sequence at least 70% identical to SEQ ID NO: 1, wherein the engineered AAV VP capsid polypeptide has at least one substitution as compared to SEQ ID NO: 1 in the 581 to 589 region, corresponding to residue 581 to residue 589 of SEQ ID NO: 1, inclusive, wherein the capsid polypeptide is capable of assembling into a recombinant AAV virion (rAAV), and wherein the VP capsid polypeptide does not have the sequence of any of SEQ ID NO: 3, SEQ ID NO: 4, SEQ ID NO: 5, SEQ ID NO: 6, SEQ ID NO: 7, or SEQ ID NO: 8. In some embodiments, the VP capsid polypeptide comprises one or more amino acid substitutions relative to SEQ ID NO: 1 in the region from residue 581 to residue 589, inclusive. The VP capsid polypeptide may comprise a sequence of SEQ ID NO: 2, wherein the 581 to 589 region has a sequence conferring ocular tissue tropism or preference.

[0160] In some embodiments, the engineered adeno-associated virus (AAV) viral protein (VP) capsid polypeptide is ocular tissue-tropic and has an amino acid sequence at least 70% identical to SEQ ID NO: 1, wherein the engineered AAV VP capsid polypeptide has at least one substitution as compared to SEQ ID NO: 1 in the 581 to 589 region, corresponding to residue 581 to residue 589 of SEQ ID NO: 1, inclusive, wherein the capsid polypeptide is capable of assembling into a recombinant AAV virion (rAAV), wherein the at least one substitution confers higher tropism for an ocular tissue on the rAAV as compared to an rAAV virion having an AAV5 VP capsid polypeptide of SEQ ID NO: 1, and wherein the VP capsid polypeptide does not have the sequence of any of SEQ ID NO: 3, SEQ ID NO: 4, SEQ ID NO: 5, SEQ ID NO: 6, SEQ ID NO: 7, or SEQ ID NO: 8. In some embodiments, the ocular tissue-tropic VP capsid polypeptide comprises one or more amino acid substitutions relative to SEQ ID NO: 1 in the region from residue 581 to residue 589, inclusive.

[0161] In particular embodiments, the engineered adeno-associated virus (AAV) viral protein (VP) capsid polypeptide (e.g., an ocular tissue-tropic VP capsid polypeptide) has an amino acid sequence at least 75%, 77.7%, 80%, 85%, 88.8%, 90%, 91%, 92%, 93%, 94%, 95%, 96%, 97%, 98% identical to the sequence of SEQ ID NO: 1.

[0162] In some embodiments, the AAV VP capsid polypeptide is an ocular tissue-tropic capsid polypeptide and has an amino acid sequence of SEQ ID NO: 2, wherein X¹, X², X³, X⁴, X⁵, X⁶, X⁷, X⁸, and X⁹ are each independently selected from any amino acid, wherein the capsid polypeptide is capable of assembling into a recombinant AAV virion (rAAV), wherein the at least one substitution confers higher tropism for an ocular tissue on the rAAV as compared to an rAAV virion having an AAV5 VP capsid polypeptide of SEQ ID NO: 1, and wherein the VP capsid polypeptide does not have the sequence of any of SEQ ID NO: 3, SEQ ID NO: 4, SEQ ID NO: 5, SEQ ID NO: 6, SEQ ID NO: 7, or SEQ ID NO: 8, optionally with further mutations elsewhere in the VP capsid polypeptide. In some embodiments, X¹X²X³X⁴X⁵X⁶X⁷X⁸X⁹ (SEQ ID NO: 5014) of the ocular tissue-tropic VP capsid polypeptide correspond to a 581 to 589 region conferring ocular tissue tropism or preference.

[0163] In some embodiments, the engineered adeno-associated virus (AAV) viral protein (VP) capsid polypeptide (e.g., an ocular tissue-tropic VP capsid polypeptide) has an amino acid sequence of SEQ ID NO: 2, wherein amino acid residues X¹, X², X³, X⁴, X⁵, X⁶, X⁷, X⁸, and X⁹ are each independently selected from A, R, N, D, C, E, Q, G, H, I, L, K, M, F, P, S, T, W, Y, and V; wherein the engineered AAV VP capsid polypeptide is capable of assembling into a recombinant AAV virion (rAAV); and wherein the rAAV VP capsid polypeptide does not have the sequence of any of SEQ ID NO: 1, SEQ ID NO: 3, SEQ ID NO: 4, SEQ ID NO: 5, SEQ ID NO: 6, SEQ ID NO: 7, or SEQ ID NO: 8.

[0164] In some embodiments, the 581 to 589 region of the engineered VP capsid polypeptide, corresponding to residues 581 to 589, inclusive, with reference to SEQ ID NO: 1, has a sequence that is at least 70%, at least 75%, at least 77.7%, at least 80%, at least 85%, at least 88.8%,at least 90%, at least 91%, at least 92%, at least 93%, at least 94%, at least 95%, at least 96%, at least 97%, at least 98%, or at least 99% identical to a 581 to 589 region described herein. In some embodiments, the 581 to 589 region of the engineered VP capsid polypeptide comprises 1 amino acid substitution relative to a 581 to 589 region described herein. In some embodiments, the 581 to 589 region of the engineered VP capsid polypeptide comprises 2 amino acid substitutions relative to a 581 to 589 region described herein. In particular embodiments, the 581 to 589 region of the engineered VP capsid polypeptide has a sequence that is identical to a 581 to 589 region described herein.

[0165] In some embodiments, the engineered adeno-associated virus (AAV) viral protein (VP) capsid polypeptide is an engineered AAV5 viral capsid protein, wherein the engineered AAV VP5 capsid polypeptide has at least one substitution as compared to SEQ ID NO: 1 in the 581 to 589 region, corresponding to residues 581 to 589, inclusive, of SEQ ID NO: 1, inclusive; wherein the capsid polypeptide is capable of assembling into a recombinant AAV virion (rAAV); wherein the at least one substitution confers higher tropism for an ocular tissue on the rAAV as compared to an rAAV virion having an AAV5 VP capsid polypeptide of SEQ ID NO: 1, and wherein the VP capsid polypeptide does not have the sequence of any of SEQ ID NO: 3, SEQ ID NO: 4, SEQ ID NO: 5, SEQ ID NO: 6, SEQ ID NO: 7, or SEQ ID NO: 8, optionally with further mutations elsewhere in the VP protein.

[0166] In some embodiments, the AAV VP capsid polypeptides have an amino acid sequence of SEQ ID NO: 2, wherein X¹, X², X³, X⁴, X⁵, X⁶, X⁷, X⁸, and X⁹ are each independently selected from A, R, N, D, C, E, Q, G, H, I, L, K, M, F, P, S, T, W, Y, and V; and wherein the polypeptide does not have the sequence of any of SEQ ID NO: 1, SEQ ID NO: 3, SEQ ID NO: 4, SEQ ID NO: 5, SEQ ID NO: 6, SEQ ID NO: 7, or SEQ ID NO: 8.

[0167] In some embodiments, the engineered AAV VP capsid polypeptide comprises a polypeptide sequence represented by the formula: (A)-(X)-(B) wherein: (A) is the polypeptide sequence of SEQ ID NO: 12 (VAYNVGGQMATNNQSSTTAP, corresponding to residues 561 to 580 of SEQ ID NO: 2); (X) is a 581 to 589 region that confers ocular tissue tropism on a recombinant AAV virion (rAAV); and (B) is the polypeptide sequence of SEQ ID NO: 13 (IVPGSVWMERDVYLQGPIWA, corresponding to residues 590 to 609 of SEQ ID NO: 2); and wherein the capsid polypeptide is capable of assembling into the rAAV and, the capsid does not have the sequence of any of SEQ ID NO: 1, SEQ ID NO: 3, SEQ ID NO: 4, SEQ ID NO: 5, SEQ ID NO: 6, SEQ ID NO: 7, or SEQ ID NO: 8. Also encompassed herein are rAAVs composed of engineered AAV5 VP2 capsid polypeptides and engineered AAV5 VP3 capsid polypeptides comprising a 581 to 589 region that confers ocular tissue tropism at the region corresponding to amino acid residues 445 to 453 in AAV5 VP2 or the region corresponding to amino acid residues 389 to 397 in AAV5 VP3.

[0168] In some embodiments, the engineered AAV VP capsid polypeptide confers ocular tissue tropism or preference, wherein the ocular tissue is selected from the group consisting of aqueous humor, choroid, retina, optic nerve, vitreous humor, remaining eye tissue, and any combination thereof.

[0169] Described below are engineered mutated AAV5 VP1 polypeptide sequences that confer stable or improved virion assembly, tissue tropism, or both. In some embodiments, the present disclosure provides an AAV5 VP1 capsid polypeptide having a sequence homology of no more than 98.7% to SEQ ID NO: 1, wherein the AAV5 capsid polypeptide sequence has at least one mutation in a region from a position corresponding to 581 to a position corresponding to 589 of SEQ ID NO: 1. In some embodiments, an engineered AAV5 polypeptide comprises at least one amino acid substitution relative to residues 561 to 580 of SEQ ID NO: 1.

[0170] Also encompassed herein are rAAVs composed of engineered AAV5 VP2 capsid polypeptides and engineered AAV5 VP3 capsid polypeptides comprising a 581 to 589 region that confers ocular tissue tropism at the region corresponding to amino acid residues 445 to 453 in AAV5 VP2 or the region corresponding to amino acid residues 389 to 397 in AAV5 VP3.

Engineered VP Polypeptides Competent for rAAV Assembly

[0171] In various preferred embodiments, the mutated (engineered, recombinant) VP capsid polypeptides of the present disclosure are capable of forming an assembled virion, and in some instances that exhibit similar or improved stability when compared to a virion that comprises the AAV5 VP1 capsid polypeptide of SEQ ID NO: 1.

[0172] The frequency of a given amino acid residue occurring in assembled, purified viruses at a specified position within the 581 to 589 region, corresponding to position 581 to position 589 of SEQ ID NO: 1, or corresponding to X¹ to X⁹ as generalized in SEQ ID NO: 2, over the frequency of that given amino acid residue occurring at the specified position in the entire plasmid library was analyzed to identify sequence rules for capsid polypeptide sequences that favor viral capsid assembly. Based on the determined amino acid residue frequency, the contribution of each amino acid at each position of the 581 to 589 region to capsid assembly was determined, and sequences of the 581 to 589 region (X¹X²X³X⁴X⁵X⁶X⁷X⁸X⁹ of SEQ ID NO: 2) that favor capsid assembly, and rules for selecting sequences that favor capsid assembly, were identified.

[0173] Disclosed herein are engineered AAV5 VP capsid polypeptides capable of forming an assembled viral capsid that may exhibit similar or improved stability as compared to wild type AAV5 VP capsid polypeptide, wherein the engineered variant AAV5 VP capsid polypeptide sequence has one or more mutations, wherein the VP1 polypeptide sequence has said one or more mutations in a 581 to 589 region (corresponding to position 581 to position 589 in SEQ ID NO: 2), and wherein X¹ is selected from A, D, E, G, L, M, N, Q, S, T, or V, or X¹ is selected from A, D, E, M, or T. In some embodiments, X¹ is E; or X² is selected from A, C, D, E, G, H, I, N, P, Q, S, T, or V, or X² is selected from A, S, T, or V, or X² is A; or wherein X³ is selected from A, D, E, G, H, M, N, Q, S, T, or V, or X³ is selected from D, E, N, Q or T, or X³ is D or T; or wherein X⁴ is selected from A, D, E, G, H, N, P, Q, S, or T, or X⁴ is selected from D, E, P, or Q, or X⁴ is E; or wherein X⁵ is selected from A, C, D, E, G, H, N, Q, S, T, or Y, or X⁵ is selected from D, E, N, Q or T, or X⁵ is N; or wherein X⁶ is selected from A, D, E, G, H, N, P, Q, S, or T, or X⁶ is selected from D, N, or Q, or X⁶ is D; or wherein X⁷ is selected from A, C, D, E, G, H, N, Q, S, or T, or X⁷ is selected from A, D, E or G, or X⁷ is A; or wherein X⁸ is selected from A, C, D, E, G, H, N, Q, S, or T, or X⁸ comprises A, D, G, or S, or X⁸ is G; or wherein X⁹ is selected from A, D, E, G, H, N, P, Q, S, or T, or X⁹ is selected from A, D, G, or P, or X⁹ is G.

[0174] In various embodiments, the VP polypeptide is capable of forming an assembled viral capsid, and in some instances exhibits similar or improved stability when compared to a virion that comprises the AAV5 VP1 capsid polypeptide of SEQ ID NO:1.

[0175] Examples of amino acid substitutions within a 581 to 589 region that may favor viral capsid assembly are provided in TABLE 2. In some embodiments, the following amino acids can be independently mutated, in any combination, at any one or more positions X¹-X⁹, with reference to SEQ ID NO: 2, to provide an AAV VP1 capsid that is capable of assembling. Additionally, one or more mutations outside of the X¹-X⁹ region can be allowed, as long as the capsid is still capable of assembling.

TABLE 2
581 to 589 Region Amino Acid Variations for Viral Assembly
Viral Assembly Options

X¹ is A, D, E, G, L, M, N, Q, S, T, or V
X¹ is A, D, E, M, or T
X¹ is E
X² is A, C, D, E, G, H, I, N, P, Q, S, T, or V
X² is A, S, T, or V
X² is A
X³ is A, D, E, G, H, M, N, Q, S, T, or V
X³ is D, E, N, Q or T
X³ is D or T
X⁴ is A, D, E, G, H, N, P, Q, S, or T
X⁴ is D, E, P, or Q
X⁴ is E
X⁵ is A, C, D, E, G, H, N, Q, S, T, or Y
X⁵ is D, E, N, Q or T
X⁵ is N.
X⁶ is A, D, E, G, H, N, P, Q, S, or T;
X⁶ is D, N, or Q; or
X⁶ is D.
X⁷ is s A, C, D, E, G, H, N, Q, S, or T;
X⁷ is A, D, E or G; or
X⁷ is A.
X⁸ is A, C, D, E, G, H, N, Q, S, or T;
X⁸ is A, D, G, or S; or
X⁸ is G.
X⁹ is A, D, E, G, H, N, P, Q, S, or T;
X⁹ is A, D, G, or P; or
X⁹ is G.

### 581 to 589 Regions for Ocular Tissue Tropism

[0176] The present disclosure provides AAV5 virions with a VP capsid polypeptide having at least one mutation in a region with residues that interact with target cells (e.g., a target eye cell in a target ocular tissue of interest), where the at least one mutation confers increased ocular tissue tropism or preference as compared to a wild type VP capsid polypeptide (e.g., a wild type AAV5 capsid polypeptide of SEQ ID NO: 1). In some embodiments, provided herein are AAV5 VP1 capsid polypeptide having a sequence homology of at least 80% to SEQ ID NO: 1, wherein the AAV5 VP1 capsid polypeptide has at least one mutation in a 581 to 589 region, corresponding to residues 581 to 589 of SEQ ID NO: 1, and wherein said at least one mutation drives increased ocular tissue tropism as compared to the wild type VP capsid polypeptide (SEQ ID NO: 1). The following sequences rules and sequences also apply to the 581 to 589 region in AAV5 VP2 (amino acid residues 445 to 453; VP2 sequence shown in SEQ ID NO: 10) and in AAV5 VP3 (amino acid residues 389 to 397; VP3 sequences shown in SEQ ID NO: 11). Thus, the present disclosure encompasses AAV5 VP2 capsid polypeptides and AAV5 VP3 capsid polypeptides having one or more amino acid substitutions in the 581 to 589 regions of VP2 and VP3, corresponding to the AAV5 VP1 amino acid residues of the 581 to 589, where the one or more mutations comport to the rules or sequences in the following section.

[0177] VP capsid polypeptides (e.g., V1, VP2, or VP3 capsid polypeptides, or combinations thereof) comprising an ocular tissue-tropic 581 to 589 region, or any 581 to 589 region adhering to the rules identified herein) may assemble to form an rAAV with altered surface properties compared to a wild type AAV (e.g., comprising a VP1 polypeptide of SEQ ID NO: 1). The surface may form an interface that forms interactions with a target tissue, and the altered surface properties of the rAAV may promote tissue specific interactions (e.g., ocular tissue-specific interactions) between the rAAV and the target tissue. In some embodiments, the altered surface properties may be an altered charge distribution, increased or decreased hydrophobicity, altered availability or distribution of hydrogen bond donors or acceptors, or formation or reshaping of binding pockets. Such altered surface properties may favor interactions between the rAAV and ocular tissue while disfavoring interactions between the rAAV and non-ocular tissue. In some embodiments, the altered surface properties may favor interactions between the rAAV and a specific ocular tissue or ocular cells (e.g., retina, optic nerve, choroid, photoreceptor cells, aqueous humor, or vitreous humor) while disfavoring interactions between the rAAV and other ocular tissues or cells or non-ocular tissues.

[0178] An ocular tissue-tropic rAAV assembled from VP capsid polypeptides (e.g., V1, VP2, or VP3 capsid polypeptides, or combinations thereof) comprising a 581 to 589 region, or any 581 to 589 region adhering to the rules identified herein) may preferentially infect an ocular tissue (e.g., retinal tissue), ocular cells (e.g., retinal pigment epithelial cells, photoreceptor cells, rod photoreceptor cells, cone photoreceptor cells, or combinations thereof), or both, as compared to other ocular tissue (e.g., choroid, aqueous humor, or vitreous humor) or other ocular cells (e.g., photoreceptor cells) at a higher level as compared to wild type AAV5. The ocular tissue-tropic AAV may infect the ocular tissue at a rate that is at least about 1.1-fold, at least about 1.2-fold, at least about 1.3-fold, at least about 1.4-fold, at least about 1.5-fold, at least about 1.6-fold, at least about 1.7-fold, at least about 1.8-fold, at least about 1.9-fold, at least about 2-fold, at least about 2.2-fold, at least about 2.4-fold, at least about 2.6-fold, at least about 2.8-fold, at least about 3-fold, at least about 3.5-fold, at least about 4-fold, at least about 4.5-fold, at least about 5-fold, at least about 6-fold, at least about 7-fold, at least about 8-fold, at least about 9-fold, at least about 10-fold, at least about 20-fold, at least about 30-fold, at least about 40-fold, at least about 50-fold, at least about 100-fold, at least about 200-fold, at least about 300-fold, at least about 400-fold, or at least about 500-fold an infection rate for the other ocular tissue, as compared to wild type AAV5.

[0179] In some embodiments, the ocular tissue-tropic rAAV assembled from VP capsid polypeptides (e.g., V1, VP2, or VP3 capsid polypeptides, or combinations thereof) comprising a 581 to 589 region (e.g., any 581 to 589 region adhering to the rules identified herein) may deliver a payload to the tissue infected by the rAAV. The payload (e.g., a payload encoding a therapeutic peptide or a therapeutic polynucleotide) may be expressed in the tissue. In some embodiments, an expression level of the payload in an ocular tissue (e.g., retinal tissue), ocular cell (e.g., retinal pigment epithelial cell, photoreceptor cell, rod photoreceptor cell, cone photoreceptor cell, or combinations thereof), or both may have at least about 2.5-fold, at least about 2.8-fold, at least about 3-fold, at least about 3.2-fold, at least about 3.5-fold, at least about 4-fold, at least about 4.5-fold, at least about 5-fold, at least about 6-fold, at least about 7-fold, at least about 8-fold, at least about 9-fold, at least about 10-fold, at least about 20-fold, at least about 50-fold, at least about 75-fold, at least about 100-fold, at least about 200-fold, at least about 500-fold higher, or at least about 1000-fold an expression level in a different ocular tissue (e.g., choroid, vitreous humor, or aqueous humor) or ocular cell (e.g., photoreceptor cells). In some embodiments, the payload may be under control of a cell type- or tissue type-specific promoter to direct expression in a target cell type or target tissue type. For example, expression of the payload may be under control of a retinal-specific promoter to promote retinal-specific expression, a retinal pigment epithelium-specific promoter to promote retinal pigment epithelium-specific expression, a choroid-specific promoter to promote choroid-specific expression, a photoreceptor-specific promoter to promote photoreceptor-specific expression, or an optic nerve-specific promoter to promote optic nerve-specific expression.

[0180] In some embodiments, payload delivery to the ocular tissue using an ocular tissue-tropic AAV may have at least about 1.1-fold, at least about 1.2-fold, at least about 1.3-fold, at least about 1.4-fold, at least about 1.5-fold, at least about 1.6-fold, at least about 1.7-fold, at least about 1.8-fold, at least about 1.9-fold, at least about 2-fold, at least about 2.2-fold, at least about 2.4-fold, at least about 2.6-fold, at least about 2.8-fold, at least about 3-fold, at least about 3.5-fold, at least about 4-fold, at least about 4.5-fold, at least about 5-fold, at least about 6-fold, at least about 7-fold, at least about 8-fold, at least about 9-fold, at least about 10-fold, at least about 20-fold, at least about 30-fold, at least about 40-fold, at least about 50-fold, at least about 100-fold, at least about 200-fold, at least about 300-fold, at least about 400-fold, or at least about 500-fold higher specificity for the ocular tissue as compared to a wild type AAV (e.g., a wild type AAV5).

### Ocular Tissue-Tropic Sequences

[0181] Recombinant AAV viral capsids with specificity for ocular tissues (ocular tissue-tropic rAAVs) may be identified by screening rAAV libraries comprising VP capsid polypeptides with 581 to 589 regions, as described herein. The libraries may be screened in non-human primates (NHPs) by intravitreally administering the rAAV library and identifying sequences of 581 to 589 regions in VP capsid polypeptides that conferred tissue-tropic accumulation in or infection of ocular tissues (e.g., retina) to the rAAVs.

[0182] Disclosed herein are engineered AAV5 VP capsid polypeptides capable of forming an assembled virion that exhibits increased ocular tissue tropism or preference as compared to a wild type AAV VP capsid polypeptide (e.g., a VP1 of SEQ ID NO: 1, a VP2 of SEQ ID NO: 10, or aVP3 of SEQ ID NO: 11), wherein the engineered variant AAV5 VP capsid polypeptide sequence has one or more amino acid substitutions in a 581 to 589 region of the VP capsid polypeptide, corresponding to positions 581 to 589 in SEQ ID NO: 2 (X¹X²X³X⁴X⁵X⁶X⁷X⁸X⁹). In some embodiments, X¹ is selected from A, R, N, D, C, E, Q, G, H, I, L, K, M, F, P, S, T, W, Y, or V. In some embodiments, X² is selected from A, R, N, D, C, E, Q, G, H, I, L, K, M, F, P, S, T, W, Y, or V. In some embodiments, X³ is selected from A, R, N, D, C, E, Q, G, H, I, L, K, M, F, P, S, T, W, Y, or V. In some embodiments, X⁴ is selected from A, R, N, D, C, E, Q, G, H, I, L, K, M, F, P, S, T, W, Y, or V. In some embodiments, X⁵ is selected from A, R, N, D, C, E, Q, G, H, I, L, K, M, F, P, S, T, W, Y, or V. In some embodiments, X⁶ is selected from A, R, N, D, C, E, Q, G, H, I, L, K, M, F, P, S, T, W, Y, or V. In some embodiments, X⁷ is selected from A, R, N, D, C, E, Q, G, H, I, L, K, M, F, P, S, T, W, Y, or V. In some embodiments, X⁸ is selected A, R, N, D, C, E, Q, G, H, I, L, K, M, F, P, S, T, W, Y, or V. In some embodiments, X⁹ is selected from A, R, N, D, C, E, Q, G, H, I, L, K, M, F, P, S, T, W, Y, or V.

[0183] An ocular tissue-tropic 581 to 589 region may comprise one or more positively charged or basic amino acid residues. The positively charged or basic amino acid residues may be independently selected from K, R, or H. In some embodiments, at least one of X¹, X², X³, X⁴, X⁵, X⁶, X⁷, X⁸, or X⁹ of the 581 to 589 region is K, R, or H. In some embodiments at least two of X¹, X², X³, X⁴, X⁵, X⁶, X⁷, X⁸, or X⁹ of the 581 to 589 region are independently selected from K, R, or H. In some embodiments, at least three of X¹, X², X³, X⁴, X⁵, X⁶, X⁷, X⁸, or X⁹ of the 581 to 589 region are independently selected from K, R, or H.

[0184] An ocular tissue-tropic 581 to 589 region may comprise fewer negatively charged or acidic amino acid residues than the 581 to 589 region of a wild type VP polypeptide (e.g., SEQ ID NO: 1). The negatively charged or acidic amino acid residues may be D or E. In some embodiments, no more than one of X¹, X², X³, X⁴, X⁵, X⁶, X⁷, X⁸, or X⁹ of the 581 to 589 region is E or E. In some embodiments, none of X¹, X², X³, X⁴, X⁵, X⁶, X⁷, X⁸, or X⁹ of the 581 to 589 region are D or E.

[0185] In some embodiments, provided herein are AAV5 VP capsid polypeptide having at least one mutation in a 581 to 589 region, corresponding to residues 581 to 589 of AAV5 VP1 (e.g., SEQ ID NO: 1), wherein said at least one mutation drives increased ocular tissue tropism.

[0186] Retina Tissue-Tropic AAV VP Capsid Polypeptides. Described herein are engineered AAV VP capsid polypeptides comprising a variant 581 to 589 region predicted to confer increased retina tissue tropism, and predicted to confer increased retina tissue tropism compared to a wild type AAV VP capsid polypeptide (e.g., an AAV5 VP capsid polypeptide), based on a primary screen of a recombinant AAV5 capsid library. TABLE 3 provides 581 to 589 region sequences predicted to confer retina tissue tropism or preference.

TABLE 3
Exemplary 581 to 589 Region
Sequences for Retinal Targeting

| SEQ ID | |
|---|---|
| NO | 581 to 589 Region |
| 14 | AALHSRMYQ |
| 15 | AAMRWQRES |
| 16 | AAVLKYWQQ |
| 17 | ACCQKRRSQ |
| 18 | ACKGKQKWA |
| 19 | ACVSLRQGC |
| 20 | ADCPLYCQP |
| 21 | AEKGCRKYG |
| 22 | AFISTRRAG |
| 23 | AFKFKSDWG |
| 24 | AFLTIRRHY |
| 25 | AFMRPQQFP |
| 26 | AFVDNLMDP |
| 27 | AGALARKMM |
| 28 | AGVSKRTGS |
| 29 | AHKYSRTMQ |
| 30 | AHVKPVQTM |
| 31 | AHWPKQYDP |
| 32 | AICRKDRHQ |
| 33 | AIKATRFRN |
| 34 | AIKCREQMR |
| 35 | AIKELRLWP |
| 36 | AIKMSRRYE |
| 37 | AIKTRGCSY |
| 38 | AIRLAGPIG |
| 39 | AIYHDLRAM |
| 40 | ALKITRLME |
| 41 | ALKNVPLYG |
| 42 | ALKSRGKGD |
| 43 | ALKTTSKWP |
| 44 | AMCAKKKWC |
| 45 | AMKLHKSAG |
| 46 | AMKQKQAYQ |
| 47 | ANIQYRHGM |
| 48 | ANKASKRAC |
| 49 | APKPATKHP |
| 50 | AQYPMHRHQ |
| 51 | ARSRLKNQT |
| 52 | ASHGMGRQA |
| 53 | ASRQKYKCV |
| 54 | ATHMLGRHG |
| 55 | ATKQKTCLG |
| 56 | ATRGCCHSW |
| 57 | ATWKEELSE |
| 58 | AVAGWLRAE |
| 59 | AVGQSKHVP |
| 60 | AVHFKKCHL |
| 61 | AVKMKSTPP |
| 62 | AVRTSRHCF |
| 63 | AWKLKKSYM |
| 64 | AYKQKQKYN |
| 65 | CAKPKVAIC |
| 66 | CAKVHRNWD |
| 67 | CARFERHMY |
| 68 | CCKCRKYMS |
| 69 | CCQPKPWKW |
| 70 | CDYKRVKKY |
| 71 | CEMFWARVI |
| 72 | CFGTIRRGC |
| 73 | CFILLKARS |
| 74 | CFKEYRHHS |
| 75 | CIHPKSKYL |
| 76 | CIKQKKSSN |
| 77 | CIRSLFHAG |
| 78 | CKHTCNQCI |
| 79 | CKKHQGYMP |
| 80 | CKMPISKTD |
| 81 | CLNCKERRT |
| 82 | CMKIRQAMR |
| 83 | CMKTKGHMP |
| 84 | CMQRKCRMV |
| 85 | CQGAIRRHC |
| 86 | CQYHPRKWP |
| 87 | CRCKRTREQ |
| 88 | CSHGYSRVG |
| 89 | CSKMIRSLE |
| 90 | CSKTKNNVR |
| 91 | CSKVANVMH |
| 92 | CSRLRRWQF |
| 93 | CTFLYDEQY |
| 94 | CTKQKKRGN |
| 95 | CTRDGRKWG |
| 96 | CVLTSRMGS |
| 97 | CVRNVKNCM |
| 98 | DAFKYKRNA |
| 99 | DAHSYRTHF |
| 100 | DAKCRWKYC |
| 101 | DAKKLHKIE |
| 102 | DALVYRRNQ |
| 103 | DARINRTCY |
| 104 | DARQKKCYQ |
| 105 | DARQLRQYH |
| 106 | DARWRSITG |
| 107 | DAVRARYMQ |
| 108 | DCRQVRKVA |
| 109 | DFDGTFDFV |
| 110 | DFKSRHKTC |
| 111 | DFNRFRYHG |
| 112 | DGNKARVKN |
| 113 | DGRKYMRGC |
| 114 | DIARQRKFQ |
| 115 | DIIRMRRTT |
| 116 | DIKLKKKCD |
| 117 | DIKNIRSHH |
| 118 | DIRTSRVHV |
| 119 | DITKAKRAH |
| 120 | DKAKRGHSS |
| 121 | DKKDKKGWY |
| 122 | DKKRSQWSC |
| 123 | DKVRRERCH |
| 124 | DMKKRHGSC |
| 125 | DMRKAGQTY |
| 126 | DMSRQRAQF |
| 127 | DPKKKGTWS |
| 128 | DQAKFRRSY |
| 129 | DQYRMRQQQ |
| 130 | DRCKKQSGA |
| 131 | DRIGFKKQQ |
| 132 | DRKLKANWY |
| 133 | DSKYGRKGL |
| 134 | DSNKRTRYS |
| 135 | DSRHSRVME |
| 136 | DSRIMRSAE |
| 137 | DSRIVRTSS |
| 138 | DSRLIRCFH |
| 139 | DSSRKGQMN |
| 140 | DTKAWRNPS |
| 141 | DTKSRKEMD |
| 142 | DTKVKRHVA |
| 143 | DTKWSRMRA |
| 144 | DTRRCVHRS |
| 145 | DTRSKGRFT |
| 146 | DVKNRSMAW |
| 147 | DVKPSRGGY |
| 148 | DVKQRRAPH |
| 149 | DVKTRRIFS |
| 150 | DVNRKREYS |
| 151 | DVRAVRFWP |
| 152 | DVRRMAKAA |
| 153 | DVRSKALMC |
| 154 | DVRTERRIS |
| 155 | DVRTNRIEH |
| 156 | DVTSRKWLN |
| 157 | DWKPKRCMP |
| 158 | DYQPPRKSA |
| 159 | DYRQNDVAE |
| 160 | DYRRSLKAM |
| 161 | DYTRFRSHQ |
| 162 | EAGKGRKYW |
| 163 | EAKAKQMPG |
| 164 | EAKGRVIGP |
| 165 | EAKGTRCPF |
| 166 | EAKIRNFTM |
| 167 | EAKMFVRHH |
| 168 | EAKNIRCKA |
| 169 | EAKTKRFCR |
| 170 | EAKVQRGYN |
| 171 | EAKWSGRKN |
| 172 | EAMWWRHGG |
| 173 | EARLTRCCL |
| 174 | EARSCRCGL |
| 175 | EARTRAHIG |
| 176 | EARVIRSNV |
| 177 | EARYKGTQY |
| 178 | EASIKKQAM |
| 179 | EASKRMIVK |
| 180 | ECHKIKKGY |
| 181 | ECRFNRKKG |
| 182 | EERPRIITR |
| 183 | EFHRKTRAS |
| 184 | EFKPRKSGA |
| 185 | EFKRKHIQQ |
| 186 | EFRAQRTLA |
| 187 | EFRKSGSCY |
| 188 | EFRMVRAQE |
| 189 | EFRYQRAHC |
| 190 | EFSSRWSVF |
| 191 | EGKPRSRLG |
| 192 | EGKSRRHHD |
| 193 | EGKYGKKHG |
| 194 | EGRGMRRQC |
| 195 | EHKQKMRER |
| 196 | EHRPVRSQM |
| 197 | EHRTRHGWT |
| 198 | EHVRLKHLA |
| 199 | EIAKYRWVQ |
| 200 | EIKPCRHRC |
| 201 | EIKPRRIAS |
| 202 | EIKSKKKFD |
| 203 | EIKWQRGYY |
| 204 | EIRKSGHKQ |
| 205 | EIRMNKSNA |
| 206 | EIRTSKEAR |
| 207 | EIWKCRRQV |
| 208 | EKAIMKLRS |
| 209 | EKAPSKKGI |
| 210 | EKGYNKHRG |
| 211 | EKKLLNRWW |
| 212 | EKKPKNRYN |
| 213 | EKKTKQRMQ |
| 214 | EKKWRGIMP |
| 215 | EKREKHRQT |
| 216 | EKVRTCWRG |
| 217 | ELKGKKAIQ |
| 218 | ELRRYGFQH |
| 219 | EMKAKKCHT |
| 220 | EMKLMKKVW |
| 221 | EMKMGRQWA |
| 222 | EMKQMRKFP |
| 223 | EMRVKRTER |
| 224 | ENKSAKRGC |
| 225 | ENTRRKFTS |
| 226 | EPKLKVYKS |
| 227 | EPKSRPFKC |
| 228 | EQARSRKVG |
| 229 | EQGRTKKMY |
| 230 | EQKLRKAMP |
| 231 | EQKNSRAQF |
| 232 | EQRQFRAKD |
| 233 | EQRSSRYAA |
| 234 | ERCRFKNGN |
| 235 | ERHTMHKAP |
| 236 | ERKGTVKMT |
| 237 | ERKQKGTCG |
| 238 | ERVQARKYC |
| 239 | ESFKRKVGH |
| 240 | ESKSYKCLN |
| 241 | ESMRGRKMP |
| 242 | ESRDVRAMN |
| 243 | ESRFNRSQG |
| 244 | ESRFRKDSN |
| 245 | ESRIKREWH |
| 246 | ESRKAHHDR |
| 247 | ESRPFRRFH |
| 248 | ETARKGRWY |
| 249 | ETKKHSSFW |
| 250 | ETKLFKWQD |
| 251 | ETKLKKADK |
| 252 | ETKRHQMAQ |
| 253 | ETKRRQCGY |
| 254 | ETKVHKVIG |
| 255 | ETKYRKRAE |
| 256 | ETRAGRTKG |
| 257 | ETRHRMVGC |
| 258 | ETRLGKHTY |
| 259 | ETRLMRSVD |
| 260 | ETRPQRMGH |
| 261 | ETRRIQRWD |
| 262 | ETRYRANIG |
| 263 | ETVRQKHNQ |
| 264 | EVKIKKRTI |
| 265 | EVKNKGRGQ |
| 266 | EVKPARSTF |
| 267 | EVKSRQCWQ |
| 268 | EVLRMRHEQ |
| 269 | EVNRNKMRT |
| 270 | EVQRSKRIS |
| 271 | EVRPFRQGQ |
| 272 | EVRSSRLQN |
| 273 | EWKKRTTWN |
| 274 | EYARFKGHQ |
| 275 | EYKHKKTGW |
| 276 | EYKLQRSAQ |
| 277 | FAKDRRNPG |
| 278 | FAKEMRVYE |
| 279 | FAKMSGRYA |
| 280 | FAMDIRFAQ |
| 281 | FAVARSQQC |
| 282 | FMKNKRNYG |
| 283 | FPRNVTMLS |
| 284 | FQAPSRISP |
| 285 | FRDCKIRRY |
| 286 | FSQATRRQV |
| 287 | FTKAWAKRE |
| 288 | FVWSYMFGP |
| 289 | GAFCRLSAD |
| 290 | GAIRSTHSC |
| 291 | GAKTFQKLQ |
| 292 | GERLGRKVP |
| 293 | GFRMKEKMS |
| 294 | GFVKTNKSA |
| 295 | GFWPYLYMG |
| 296 | GIGQKKSWY |
| 297 | GIKSHKREP |
| 298 | GIVRRNTAN |
| 299 | GKGTMCCEC |
| 300 | GKNRCKFQC |
| 301 | GLGTKQFRN |
| 302 | GMAVKRREP |
| 303 | GMFKLNQSC |
| 304 | GMKVHRKAP |
| 305 | GMLQNRSHQ |
| 306 | GNKATNIML |
| 307 | GQGLFRRQC |
| 308 | GQKGSGRQA |
| 309 | GQKLRTSSG |
| 310 | GRSQKDWGI |
| 311 | GSAWQIWSD |
| 312 | GSKFTRQCY |
| 313 | GSKQQKGGV |
| 314 | GSKQTTGYT |
| 315 | GSKSHSHWM |
| 316 | GSKSNYHSG |
| 317 | GSSSKTTCC |
| 318 | GTAGCKKAA |
| 319 | GTAMFRVSA |
| 320 | GTIKRMTAY |
| 321 | GTKVKNCRN |
| 322 | GTKWSKKWQ |
| 323 | GVFDIRKNP |
| 324 | GVHWKKTAY |
| 325 | GVKFRNKTN |
| 326 | GVKLHTPFS |
| 327 | GVTGRFCCQ |
| 328 | GVVLIRQDD |
| 329 | GYKQQRNRD |
| 330 | GYKQTHWLG |
| 331 | GYWWLFADR |
| 332 | HASRKGTFP |
| 333 | HAWPMPATW |
| 334 | HKQWNYCPS |
| 335 | HKRTAPWTN |
| 336 | HQKYKKLTG |
| 337 | HRRPFQTKT |
| 338 | HVRSNLPIC |
| 339 | IAFQYQNRL |
| 340 | IAKMKSRYP |
| 341 | IARSGWMSG |
| 342 | IAYHYWKDV |
| 343 | ICLKRHAKA |
| 344 | IEKQRRVYA |
| 345 | IGAKRSWTS |
| 346 | IGIPKNHKP |
| 347 | IGRWMINSM |
| 348 | IGVKAHRSA |
| 349 | IHHTNFHSP |
| 350 | IHMKRAAYS |
| 351 | IIKPRSKVD |
| 352 | IKQKGELKC |
| 353 | ILLKHMKYP |
| 354 | IMKDRKSGS |
| 355 | IMPRCWDMC |
| 356 | IPQPSRKMP |
| 357 | IPRTINRCT |
| 358 | IQHRFLTYQ |
| 359 | IQKCMTRQA |
| 360 | ISTQPRQQS |
| 361 | ISWIQRTCM |
| 362 | ITFGTRKDA |
| 363 | ITFWKMRDG |
| 364 | ITKDIRWKG |
| 365 | ITRDSRWGM |
| 366 | ITTTARKVP |
| 367 | IVKEVRTNH |
| 368 | IVKPRGQCI |
| 369 | IVKQLKRTA |
| 370 | IVKYRVGTS |
| 371 | IVVESENRH |
| 372 | IVVRRFYDP |
| 373 | IVYSSRQNP |
| 374 | KAGTPGIQN |
| 375 | KEARHTRRE |
| 376 | KEFLYLSRE |
| 377 | KEKEYKKYF |
| 378 | KFRDAQNMS |
| 379 | KIKVANAAS |
| 380 | KKPANMFPW |
| 381 | KNRAVQGFN |
| 382 | KPGMVMNPN |
| 383 | KPRPKLNST |
| 384 | KQRHWGAKW |
| 385 | KQRSGWCCH |
| 386 | KSCKGRANG |
| 387 | KSFYGEHYF |
| 388 | KSNQMGKSP |
| 389 | KVKVRACSD |
| 390 | LAKDCRACN |
| 391 | LAKFKNKIL |
| 392 | LANTYHWEQ |
| 393 | LANVKGRVA |
| 394 | LAPRKQVQW |
| 395 | LARAKTSSV |
| 396 | LARYLGSQN |
| 397 | LCKEGRKAG |
| 398 | LCKWSKKQC |
| 399 | LFRMNMRTH |
| 400 | LGKSRKQMA |
| 401 | LIECRRRCP |
| 402 | LIKCKDRFT |
| 403 | LIKWNRKAM |
| 404 | LIRLYTNKE |
| 405 | LLCKVKDYQ |
| 406 | LLIKKNRGV |
| 407 | LLRLAQQGP |
| 408 | LLRMTTYAW |
| 409 | LMKICKSFP |
| 410 | LMWSRFEVP |
| 411 | LNMHYRSHK |
| 412 | LNRQRGHAS |
| 413 | LPERCRKQS |
| 414 | LPKPTKKGP |
| 415 | LPKSTKRWG |
| 416 | LQKMSRFMN |
| 417 | LQKTRSIIQ |
| 418 | LQTKKNRHY |
| 419 | LRVPRYGQS |
| 420 | LSKKRERCN |
| 421 | LSKTKSYVE |
| 422 | LTRFHGGMY |
| 423 | LVKDRCSGY |
| 424 | LVRMHRSDQ |
| 425 | LVSRLPSMR |
| 426 | LVVQRNVRQ |
| 427 | LWKTSRQCN |
| 428 | LYIHRWVSG |
| 429 | MAEHQIVTT |
| 430 | MAIRGTKAN |
| 431 | MAKLCQRKC |
| 432 | MALDFRNGK |
| 433 | MCAGYHREQ |
| 434 | MCKAHMRKD |
| 435 | MCTATSRYK |
| 436 | MEKQLKLHN |
| 437 | MFVTYYTLY |
| 438 | MGAPKKTLG |
| 439 | MHWSVHYNS |
| 440 | MHYLAMSAR |
| 441 | MIAEDEYWA |
| 442 | MIDSRKRSA |
| 443 | MISLKKKMS |
| 444 | MKILKYSQE |
| 445 | MKKDKTNST |
| 446 | MKLNRNHDC |
| 447 | MKSRPFMGS |
| 448 | MMAGMRISS |
| 449 | MMAKPLWAY |
| 450 | MMHQVTHDF |
| 451 | MMKGRSYCT |
| 452 | MMKPKGHYP |
| 453 | MNIKKNHWA |
| 454 | MPKRACNKW |
| 455 | MPWKIDTGG |
| 456 | MQKTSKKYQ |
| 457 | MQQRVFRSN |
| 458 | MQSLKSRWH |
| 459 | MSFKDLKNG |
| 460 | MSGSRRNAE |
| 461 | MSKQKKAGS |
| 462 | MSKSRSLNN |
| 463 | MSPFVRKAS |
| 464 | MSRESRSVS |
| 465 | MSWLERKAN |
| 466 | MTEGKKRIP |
| 467 | MTGKSPRGA |
| 468 | MTGVRWRSQ |
| 469 | MTIYQRGAA |
| 470 | MTMCLKKYY |
| 471 | MTMTMLPWY |
| 472 | MTRGHSIWG |
| 473 | MTRMRLSGP |
| 474 | MTTSRQRCW |
| 475 | MTWYHDIHQ |
| 476 | MVKHHRESF |
| 477 | MVKWSWHKC |
| 478 | MVMKRVMVP |
| 479 | MVVPAKYKW |
| 480 | MVWSADSYE |
| 481 | MWKDIRQWH |
| 482 | MWKSRLDSY |
| 483 | MYKCGIKCH |
| 484 | MYRAKLTAQ |
| 485 | NAMWLRHYD |
| 486 | NCAQYYGTG |
| 487 | NFKDMRSQE |
| 488 | NIGLKKKYF |
| 489 | NIRQPNQCA |
| 490 | NKHSQRREA |
| 491 | NKRDHKYWG |
| 492 | NKTKSHYGN |
| 493 | NMNHVAFAY |
| 494 | NMYMYRAQH |
| 495 | NNKGLSQNT |
| 496 | NQRLYAKSE |
| 497 | NRMRYSCYS |
| 498 | NSKTWGTLS |
| 499 | NTFISYRDQ |
| 500 | NTGKRSRQA |
| 501 | NTHALGRHG |
| 502 | NTKLSRYGM |
| 503 | NTKSAVKQP |
| 504 | NTLPSRYGN |
| 505 | NTNFRNMSW |
| 506 | NTNPSGKNF |
| 507 | NTYCKKHCS |
| 508 | NVAPKSHKW |
| 509 | NVAWRTRDL |
| 510 | NVKGIAHYC |
| 511 | NVKTLHHMW |
| 512 | NVSMLGRWN |
| 513 | NVTNQKKTW |
| 514 | NWNPCRKNA |
| 515 | NYWWMLSGP |
| 516 | PCGGKVIKA |
| 517 | PKRKGNEWC |
| 518 | PMKPTKYAH |
| 519 | PSSVKQTKA |
| 520 | PTKVLNRYN |
| 521 | PWAGTRWKQ |
| 522 | QAGCKGTWR |
| 523 | QAHMFFKHE |
| 524 | QAKWRNLWN |
| 525 | QAMHYWRYP |
| 526 | QARDRTAQF |
| 527 | QAVARGNLK |
| 528 | QCCKRKTGL |
| 529 | QCKLKGNLM |
| 530 | QCKTKKSAS |
| 531 | QCKYRYTKG |
| 532 | QCQPRKHTP |
| 533 | QCVCKKMKG |
| 534 | QCWPTMKCD |
| 535 | QDYQEDGKK |
| 536 | QEKKKANLT |
| 537 | QFKLKTRES |
| 538 | QGAGGRKDQ |
| 539 | QGALYKKQF |
| 540 | QIAKVQKTR |
| 541 | QIFRLPQAG |
| 542 | QIRDKSRHH |
| 543 | QLTRYMKST |
| 544 | QMHHKKNWM |
| 545 | QMHPESYSA |
| 546 | QMKSKTKWL |
| 547 | QMWFRYASE |
| 548 | QNSQIKKVG |
| 549 | QPEQRRKVP |
| 550 | QPKLRSQVM |
| 551 | QPKTRSMYQ |
| 552 | QPKVNRHTG |
| 553 | QPLYFRSQG |
| 554 | QQMTKKNFG |
| 555 | QSAGRKTVA |
| 556 | QSFLSLTPG |
| 557 | QSHMYGRIS |
| 558 | QSIYFRHGI |
| 559 | QSQNLRRQC |
| 560 | QSYWNLSYQ |
| 561 | QTKTYREGG |
| 562 | QTRGGCKRA |
| 563 | QTTQPRQWP |
| 564 | QVFATLTSW |
| 565 | QVFLNLREG |
| 566 | QVHGILRAH |
| 567 | QVKWKNRFP |
| 568 | QVSKCQIRK |
| 569 | QVSMRGHYR |
| 570 | QVVRNHHKE |
| 571 | RCGYHHSQT |
| 572 | RCRVAIVWT |
| 573 | RFAYWKNQG |
| 574 | RHQKRNWAN |
| 575 | RMFSVPMWD |
| 576 | RNKPIKHGP |
| 577 | RPNRVMARM |
| 578 | RTCYWSANE |
| 579 | RVHPWSQRQ |
| 580 | RWKDKNKLM |
| 581 | RWKHLKGVC |
| 582 | SAGWRSHCV |
| 583 | SALYHGAGF |
| 584 | SASWKGKTP |
| 585 | SCKPKSKST |
| 586 | SCMRKGRFQ |
| 587 | SDVRKPRQH |
| 588 | SECNNPFVM |
| 589 | SGCQMKRAF |
| 590 | SHKCKTSMT |
| 591 | SHKEIKGQA |
| 592 | SHPNTRQGD |
| 593 | SIGMRSHMG |
| 594 | SIKVQKRAG |
| 595 | SIQRLKWVN |
| 596 | SKDSFRRCC |
| 597 | SKHPRMQQA |
| 598 | SKHQYHQDA |
| 599 | SKKTGGIQT |
| 600 | SLKQQSYRG |
| 601 | SLRQNHMHQ |
| 602 | SNTTVRKQY |
| 603 | SQLSFRSAT |
| 604 | SQPRNKFSG |
| 605 | SRHRYPKCS |
| 606 | SRRVSSRMF |
| 607 | SRVKMSRQH |
| 608 | SSMPMFSGA |
| 609 | STAQKCKFM |
| 610 | STFYRFRDP |
| 611 | STGPKKNST |
| 612 | STKISRLHN |
| 613 | STKSRSHYH |
| 614 | STSSAKKYP |
| 615 | SVGYGKPWQ |
| 616 | SVHMNLRAH |
| 617 | SVKLRSWSK |
| 618 | SVKPCCRNR |
| 619 | SVRDIRYGP |
| 620 | SWWPLMTWG |
| 621 | SYVKPIQRP |
| 622 | SYWGYSRAH |
| 623 | TAKYRGLWQ |
| 624 | TARQFKSPR |
| 625 | TASSRLCCH |
| 626 | TCKGVSYRT |
| 627 | TCKPHGKCT |
| 628 | TCKYRSHLA |
| 629 | TCRGYNDSY |
| 630 | TFTRPLCMS |
| 631 | TGAFRRSGA |
| 632 | TGKLRGGWH |
| 633 | TGRFSSHMH |
| 634 | TGVKRNHAG |
| 635 | THHKARYTG |
| 636 | THKEKRTAI |
| 637 | THSSFKKMQ |
| 638 | TIIRRNTTT |
| 639 | TIIWARSMA |
| 640 | TIKTSRTDD |
| 641 | TIKYKSGNG |
| 642 | TIRDLRTQN |
| 643 | TMAQSWRSI |
| 644 | TMKSKQRWV |
| 645 | TMRSKSCSM |
| 646 | TMRWRNHSE |
| 647 | TNKFTRKGW |
| 648 | TNWLIKWMG |
| 649 | TNWPHVKAY |
| 650 | TPKSRGVYA |
| 651 | TPKVKSSFN |
| 652 | TPRPSTRAP |
| 653 | TQCQKKTAR |
| 654 | TQFQKLADR |
| 655 | TQKPKKSGS |
| 656 | TQNASRHMQ |
| 657 | TQPKLKRES |
| 658 | TQRDRMRAN |
| 659 | TQRPTTKTR |
| 660 | TSAFKKGFT |
| 661 | TSHAIIRLQ |
| 662 | TSKFFGMFA |
| 663 | TSKMPGRAS |
| 664 | TSKPNRKKT |
| 665 | TSSYKSRFH |
| 666 | TSWWLPSMT |
| 667 | TTARNQGTG |
| 668 | TTKGQVQCM |
| 669 | TTKGTGSHN |
| 670 | TTKPGRHSY |
| 671 | TTKTVREYG |
| 672 | TTRYSTAPS |
| 673 | TTVKRLNSF |
| 674 | TTWTPEQHP |
| 675 | TVKNNVLCG |
| 676 | TVKPQMVGR |
| 677 | TVKWGNKLW |
| 678 | TVNIKTRSH |
| 679 | TVREKGHDR |
| 680 | TVSSRQRTR |
| 681 | TWKTRTCAP |
| 682 | TWRYVMKEC |
| 683 | TYAKYNRMC |
| 684 | TYGFPVSVA |
| 685 | TYKYKNNYC |
| 686 | VAALNLRHP |
| 687 | VACKCKNRP |
| 688 | VAHNALKMM |
| 689 | VAKVMTTAP |
| 690 | VAKWRSKHQ |
| 691 | VARIKQDMF |
| 692 | VASRGGRGC |
| 693 | VASSQKRAI |
| 694 | VCKVNRKML |
| 695 | VCRHRQQMY |
| 696 | VCVKKYRCN |
| 697 | VGAGYKHCY |
| 698 | VHRFVNRDF |
| 699 | VIKGQATER |
| 700 | VIKSSWFKG |
| 701 | VIMRPISQQ |
| 702 | VKHKDQWGP |
| 703 | VKHRAKFCD |
| 704 | VKQFRKCFC |
| 705 | VLDRHWAAY |
| 706 | VLKQIGRNS |
| 707 | VMKDVKKVW |
| 708 | VMKDWKGKH |
| 709 | VMMLARQSQ |
| 710 | VNPYKLWKT |
| 711 | VPFNYWRME |
| 712 | VPIRVMRHG |
| 713 | VPIYTKWKN |
| 714 | VQKTSRRGE |
| 715 | VQVRRHAHG |
| 716 | VSDIANEAF |
| 717 | VSKAKSNFR |
| 718 | VSPTIRKSP |
| 719 | VSSLKKSQF |
| 720 | VSTRDKWRN |
| 721 | VTCRCKMKH |
| 722 | VTDRKQLRG |
| 723 | VTKQKCKMN |
| 724 | VTQMKHKGW |
| 725 | VTRQKCKMN |
| 726 | VVGKVMRDC |
| 727 | VVKQVGKQA |
| 728 | VVNYTALQD |
| 729 | VWGLTRHAG |
| 730 | WAKPTKKIM |
| 731 | WEPGIITGC |
| 732 | WVFSIQKQA |
| 733 | YIATKLRDQ |
| 734 | YIRDRGHYP |
| 735 | YIYPITYSQ |
| 736 | YMFEAPWIE |
| 737 | YSGAKGHMM |
| 738 | AAGASKNAK |
| 739 | AAHRPMFTS |
| 740 | AAKSFRRAA |
| 741 | AARSTQGIA |
| 742 | AATHKYRCN |
| 743 | AATKEKRHM |
| 744 | AAYTSRQLG |
| 745 | ACKIKTGQA |
| 746 | ACTKERSIR |
| 747 | ADKTKKHFA |
| 748 | AFKTMRWSM |
| 749 | AFPPYKYRK |
| 750 | AHRSKKTSM |
| 751 | AIYSAMTAF |
| 752 | AKAKMSRTY |
| 753 | AKKASKRGC |
| 754 | AKPIPQTKN |
| 755 | ALRLKNSLT |
| 756 | AMKMKKTHF |
| 757 | AMSKAIRNS |
| 758 | ANRFKNTEG |
| 759 | AQKSLHYTC |
| 760 | ASKPRKRYN |
| 761 | ATFRDSDYQ |
| 762 | ATHERRKSP |
| 763 | ATTKRKGCC |
| 764 | ATTRFPDAA |
| 765 | AVRFGAAQK |
| 766 | AVRLRSKVD |
| 767 | AWIRCIQMP |
| 768 | AYKQVKREL |
| 769 | AYMVRLNHH |
| 770 | AYMYRPATE |
| 771 | CAKGKTQTS |
| 772 | CASRKQRSH |
| 773 | CGSSYKKVQ |
| 774 | CIVQKTAQK |
| 775 | CKCGLKRFS |
| 776 | CKCLKTMKQ |
| 777 | CKTRACKYC |
| 778 | CRCKCAIKC |
| 779 | CSKYTAKAW |
| 780 | CSQGTKKSY |
| 781 | CSTQGRKAM |
| 782 | CSTSKKRTF |
| 783 | CSTSQRRWG |
| 784 | CTGPCCRPQ |
| 785 | CTKHLARQH |
| 786 | CTKKTRCQG |
| 787 | CVDILLVHR |
| 788 | CVGLDRRGY |
| 789 | DAKFSRGMQ |
| 790 | DAKFVRHQH |
| 791 | DAKPSRCCL |
| 792 | DAKSKKKWY |
| 793 | DANIEWHGN |
| 794 | DARKWSNCI |
| 795 | DARMKGISS |
| 796 | DASMWSGIE |
| 797 | DDGKEVWHH |
| 798 | DGFPKRKAC |
| 799 | DGSSIRRYP |
| 800 | DHFHPRQSP |
| 801 | DIARGKGKP |
| 802 | DIKMHRGAC |
| 803 | DKKDRKMIY |
| 804 | DKKGYALAY |
| 805 | DKKQRQWTA |
| 806 | DMQRKKREG |
| 807 | DQKFMKTYF |
| 808 | DRLPSRQCQ |
| 809 | DRRGKTSMP |
| 810 | DRRGYGVSN |
| 811 | DSQKPKKAP |
| 812 | DSRCFRRGY |
| 813 | DSRNRAHWC |
| 814 | DSSRARYKS |
| 815 | DTKQKGSPK |
| 816 | DTSRVKAAQ |
| 817 | DVKLKKRYY |
| 818 | DVKPRRSGF |
| 819 | DVRTSRGVT |
| 820 | DVRWIRHHH |
| 821 | DYHRLGRQE |
| 822 | EAKLAKSYS |
| 823 | EAKYKKNYS |
| 824 | EARGRAHSG |
| 825 | EARTSRWLA |
| 826 | ECKPKAKWM |
| 827 | ECKPRRMQA |
| 828 | ECRPTRINE |
| 829 | EFKHRWQGR |
| 830 | EGKLTKRCM |
| 831 | EIFKALRAE |
| 832 | EIRPCRFRN |
| 833 | EIRRQGQAI |
| 834 | EIRVIKSHS |
| 835 | EKHTFKKWA |
| 836 | EKKEAKKFN |
| 837 | EKKHKGEFW |
| 838 | EKRSISVHT |
| 839 | EMKVTKMRG |
| 840 | ENKLVKKTP |
| 841 | EQQCFLHGN |
| 842 | EQRIMRSQA |
| 843 | ERFHKMSAD |
| 844 | ERKARSTYC |
| 845 | ERQQRCRFS |
| 846 | ERVPMWRNA |
| 847 | ERYPQRSAF |
| 848 | ESGCNQPQD |
| 849 | ESGRKSRAE |
| 850 | ESIRAKRVA |
| 851 | ESKGYRSGC |
| 852 | ESKIKSAAS |
| 853 | ESKNVKDWK |
| 854 | ESKYRNRMC |
| 855 | ETHRKNQHN |
| 856 | ETIPFLDLG |
| 857 | ETKYVRKEW |
| 858 | ETRMRANFQ |
| 859 | ETRPFRGNE |
| 860 | ETRSRCHCA |
| 861 | ETRVSRNMP |
| 862 | ETRYFKNAY |
| 863 | ETVERCNFI |
| 864 | ETVRQKGHN |
| 865 | EVGNRKWQS |
| 866 | EVKRAPSTL |
| 867 | EVKWRKCLQ |
| 868 | EVLRPRAIA |
| 869 | EVRALRTQH |
| 870 | EVRMSRTIN |
| 871 | EVRQSRQVC |
| 872 | EVRSARQQS |
| 873 | EVTRHRLWS |
| 874 | EWHRFGRNS |
| 875 | EWWPIRHSW |
| 876 | EYKPCRRAV |
| 877 | EYKTARHAM |
| 878 | FAYKEWLPG |
| 879 | FFHSRMSQE |
| 880 | FHRALFHAG |
| 881 | FICMKKTDQ |
| 882 | FIGWMHRAN |
| 883 | FIWPIDHTS |
| 884 | FLNEYGYYQ |
| 885 | FSFQYLKKG |
| 886 | FTATSLRFP |
| 887 | GAGMKKRMS |
| 888 | GAKLKSRLD |
| 889 | GDKSRKSKM |
| 890 | GFSMMMIPW |
| 891 | GHKETRAMG |
| 892 | GILRKVNDH |
| 893 | GNVKIMRFA |
| 894 | GQKTTSTNY |
| 895 | GSKMYAHTP |
| 896 | GSRDTRQYP |
| 897 | GTHLELMNA |
| 898 | GTKQKAVIE |
| 899 | GTREHGKTP |
| 900 | GTWSAMRAT |
| 901 | GVKCQKSAK |
| 902 | GVKGHSHDR |
| 903 | GVWPCYYLQ |
| 904 | GYMECDHMQ |
| 905 | GYRFVGTTP |
| 906 | HAMIFQRAS |
| 907 | HAPMYKSAG |
| 908 | HNKDLKCQE |
| 909 | HRRMRDAIY |
| 910 | HSQRCKVIA |
| 911 | IAKGQQQMC |
| 912 | IAKQKCNCC |
| 913 | IAMRKWNCE |
| 914 | IANQLTMTT |
| 915 | IASILWSSA |
| 916 | IAVRYYHQW |
| 917 | ICKPKGKWL |
| 918 | IERKNNASQ |
| 919 | IFRLWNAKE |
| 920 | IGGPYRTIN |
| 921 | IGKYTKKMT |
| 922 | IGRFNNIAE |
| 923 | IIRPSSHAC |
| 924 | IIRSGTKYP |
| 925 | IMRGGTKYG |
| 926 | INKTVQRCG |
| 927 | INRPTRWPH |
| 928 | INVRSQHQH |
| 929 | ISNISKWRT |
| 930 | ISQSMKFSG |
| 931 | ISRDQKHVC |
| 932 | ITFPRIRAD |
| 933 | KAHAITDHS |
| 934 | KGMRCKAME |
| 935 | KHLMVPGKM |
| 936 | KKMGRMCDR |
| 937 | KMHRCKDDR |
| 938 | KNEVDTNGE |
| 939 | KSAVHQGGH |
| 940 | KSDTFRRVF |
| 941 | KTHKFSSCL |
| 942 | KVRSNREQM |
| 943 | KWQGSTHKT |
| 944 | KWTYNNTDL |
| 945 | LAGKMAHWQ |
| 946 | LAYMKILQQ |
| 947 | LCNIRCRSG |
| 948 | LDAQIVCYG |
| 949 | LFKAAVKAP |
| 950 | LFKPKKTSQ |
| 951 | LGKFSGAGS |
| 952 | LHKQYYHGM |
| 953 | LHWLIKESG |
| 954 | LKERKEVRA |
| 955 | LKGSSKSSF |
| 956 | LLWINTMIW |
| 957 | LMFYTLSRD |
| 958 | LMRNVNVEP |
| 959 | LNRQHGHAP |
| 960 | LNRYVSMGV |
| 961 | LPKVARKMF |
| 962 | LQGRYMGAQ |
| 963 | LQKNGRYSG |
| 964 | LSIRRNCCG |
| 965 | LSRHTKQLA |
| 966 | LSRPTMTIS |
| 967 | LTAKPFKCQ |
| 968 | LTGKYVGYS |
| 969 | LTKSRGQCS |
| 970 | LTRAHRSHE |
| 971 | LVIGRHQNW |
| 972 | LVRDIREFS |
| 973 | LVRYKSGGD |
| 974 | LVYTSLKDA |
| 975 | MAKQKKQAM |
| 976 | MAMEQRRFG |
| 977 | MAMREMKVC |
| 978 | MAMYYRMDD |
| 979 | MCRDRGKMV |
| 980 | MDGRFKATS |
| 981 | MEGCFMYVF |
| 982 | MGWPKHQDP |
| 983 | MHKVKSGNA |
| 984 | MIKNSGKEL |
| 985 | MIRGQRGGG |
| 986 | MIWPMSVQH |
| 987 | MLKMGFRYA |
| 988 | MLKYRQGGG |
| 989 | MLTYWTSRN |
| 990 | MMKCKRWDY |
| 991 | MMKSHKAGN |
| 992 | MNKDKRIMP |
| 993 | MNVQKRNYF |
| 994 | MPKLNRKAQ |
| 995 | MPKNYGHAP |
| 996 | MPMIKLSYS |
| 997 | MQAQPRKQG |
| 998 | MQHYLHHAT |
| 999 | MQRYKSKCC |
| 1000 | MQYMQRNAY |
| 1001 | MSKESRSQP |
| 1002 | MSLGQRTSW |
| 1003 | MSMVRKDQQ |
| 1004 | MTAGKKAWN |
| 1005 | MTTLQRQFM |
| 1006 | MVIPVEIMI |
| 1007 | MVKMKCTCT |
| 1008 | MVWPITRTD |
| 1009 | MVWPKQTEA |
| 1010 | MVWWEEKMC |
| 1011 | MVYRPLTSS |
| 1012 | MWAGKSRWC |
| 1013 | MWAPFRHWN |
| 1014 | MWAQTRQQW |
| 1015 | MYWHQTLSE |
| 1016 | NAKLNKRQM |
| 1017 | NHKSYPVAP |
| 1018 | NKHSTRAMD |
| 1019 | NRHKCGSWS |
| 1020 | NSGLKKYYG |
| 1021 | NSRNMLQNE |
| 1022 | NTKIRSVQH |
| 1023 | NTKSKSQLA |
| 1024 | NTVRTFHGW |
| 1025 | NVHAKLSAE |
| 1026 | NVKPTAWKW |
| 1027 | NYRSHRKIA |
| 1028 | PAVKKVERQ |
| 1029 | PCKLAGTWD |
| 1030 | PIGKHAFKC |
| 1031 | PLVKSGFGT |
| 1032 | PQEKRKNVA |
| 1033 | PQFTYRKYP |
| 1034 | QAAFHLKNA |
| 1035 | QATTKRTIF |
| 1036 | QCNVRTKMF |
| 1037 | QDFRLSSGM |
| 1038 | QEKCNRRGC |
| 1039 | QFAKQVKWF |
| 1040 | QGFMVMKAV |
| 1041 | QGKVKERTM |
| 1042 | QGRQVLGRE |
| 1043 | QILIKDCFS |
| 1044 | QKQKRTRAQ |
| 1045 | QMSGRCTCR |
| 1046 | QNRAIRSYT |
| 1047 | QPKFFYRSA |
| 1048 | QQLDATHER |
| 1049 | QQTKRSCMA |
| 1050 | QRKDKQTQH |
| 1051 | QSFRFWKHH |
| 1052 | QSKFKIPYC |
| 1053 | QSKLRLTEP |
| 1054 | QSQSTKAVW |
| 1055 | QSRQTGKFW |
| 1056 | QTCRKDRHF |
| 1057 | QTMKQIRAT |
| 1058 | QTRISRWDG |
| 1059 | QVFLKIRQE |
| 1060 | QVHNRLTQL |
| 1061 | QVHPSRWIR |
| 1062 | QVKMGKPNH |
| 1063 | QVMRQNTIT |
| 1064 | QYTRFNHVP |
| 1065 | RFKVWTCSC |
| 1066 | RFYDAMQMH |
| 1067 | RHDKQANGS |
| 1068 | RKNPTTCYS |
| 1069 | RKPHSGWRC |
| 1070 | RKRFTSMDP |
| 1071 | RLEDVHGNK |
| 1072 | RNKEWTGKG |
| 1073 | RQLPMNCCE |
| 1074 | RVNPELHMG |
| 1075 | SAKMQQISL |
| 1076 | SARDYREIA |
| 1077 | SARISAIGP |
| 1078 | SCKFKKSFF |
| 1079 | SCKHVVKVP |
| 1080 | SFIRTHRSW |
| 1081 | SFKMMTRQA |
| 1082 | SFKQKAREY |
| 1083 | SFRPTTWKQ |
| 1084 | SGSHYRRFP |
| 1085 | SHKFTGRCG |
| 1086 | SLNQFVMHE |
| 1087 | SQKHHTRSH |
| 1088 | SQKIVHYTN |
| 1089 | SSAQWLACD |
| 1090 | SSKFMACAS |
| 1091 | SSKLVSKTW |
| 1092 | SSRFLCHNE |
| 1093 | STKAWRYTG |
| 1094 | STKQAKRTA |
| 1095 | STTHLLRYP |
| 1096 | SVKLIGSEW |
| 1097 | SVVWPAQVE |
| 1098 | SWGYCMLDQ |
| 1099 | SWHMKMIAG |
| 1100 | SWKGMGKAD |
| 1101 | TAKITGSGS |
| 1102 | TAVRWMNGR |
| 1103 | TEYTRKKVP |
| 1104 | TGKSKSRMV |
| 1105 | TGKSKTWMP |
| 1106 | TGMRMPHGG |
| 1107 | TGTLTRWGP |
| 1108 | THFRKNWES |
| 1109 | TIANSRSHM |
| 1110 | TIKLSRFEP |
| 1111 | TIKVGHSRC |
| 1112 | TIWQRSGVD |
| 1113 | TKAIHNQSI |
| 1114 | TLKAYNHQI |
| 1115 | TMGFKTRYQ |
| 1116 | TMRGQPFGV |
| 1117 | TPDKRKWAQ |
| 1118 | TPILAGLVY |
| 1119 | TPKCIKWQQ |
| 1120 | TPRFHNKVP |
| 1121 | TPRSTRFCA |
| 1122 | TQHSLKAMM |
| 1123 | TSGWYKKSY |
| 1124 | TSKVKMWEY |
| 1125 | TSKVRSKCP |
| 1126 | TSVPHKWKR |
| 1127 | TTHLKLAAA |
| 1128 | TTKDGRAFE |
| 1129 | TTKEKKKDW |
| 1130 | TTKMGKWAA |
| 1131 | TTKPYQSIR |
| 1132 | TTKSRGFIP |
| 1133 | TTLRRHCCC |
| 1134 | TTLRTIKQA |
| 1135 | TTRTNSICS |
| 1136 | TVFYRHHHL |
| 1137 | TVGLGRRGA |
| 1138 | TVKSHTPMA |
| 1139 | TVKSREHSM |
| 1140 | TVLNYRRGF |
| 1141 | TVNVNKKAY |
| 1142 | TVRLQSYAQ |
| 1143 | TVRTLFKGN |
| 1144 | TVVAKTLRA |
| 1145 | TWRFNNHLC |
| 1146 | TYFKVMKDS |
| 1147 | VARPNVHQE |
| 1148 | VASSPRVCP |
| 1149 | VCVGRRAER |
| 1150 | VFKQFGKRE |
| 1151 | VGTSARKIG |
| 1152 | VLAPYRNCE |
| 1153 | VMVKRLATG |
| 1154 | VRQRPKFRP |
| 1155 | VSRTRIDSH |
| 1156 | VTKPKTVAD |
| 1157 | VTKWKNSGG |
| 1158 | VTMSRRSVW |
| 1159 | VTRSCCSFG |
| 1160 | VVKGMVCPC |
| 1161 | VVMQNNVAE |
| 1162 | WIEYISWWG |
| 1163 | YNFPKSAAE |
| 1164 | YNKSYRETG |
| 1165 | YPKPTRRDC |
| 1166 | YQKPSQTWS |
| 1167 | YSNLKSKAQ |
| 1168 | YTRGCHGCS |
| 1169 | YVSYARQSV |

[0187] In some embodiments, a retina tissue-tropic VP capsid polypeptide comprises a 581 to 589 region having at least 75% sequence identity to any one of SEQ ID NO: 14-SEQ ID NO: 1169. In some embodiments, a retina tissue-tropic VP capsid polypeptide comprises a 581 to 589 region having at least 77.7% sequence identity to any one of SEQ ID NO: 14-SEQ ID NO: 1169. In some embodiments, a retina tissue-tropic VP capsid polypeptide comprises a 581 to 589 region having at least 85% sequence identity to any one of SEQ ID NO: 14-SEQ ID NO: 1169. In some embodiments, a retina tissue-tropic VP capsid polypeptide comprises a 581 to 589 region having at least 88.8% sequence identity to any one of SEQ ID NO: 14-SEQ ID NO: 1169. In some embodiments, a retina tissue-tropic VP capsid polypeptide comprises a 581 to 589 region having a sequence of any one of SEQ ID NO: 14-SEQ ID NO: 1169. In some embodiments, a retina tissue-tropic VP capsid polypeptide comprises a 581 to 589 region having one or two amino acid substitutions relative to any one of SEQ ID NO: 14-SEQ ID NO: 1169. In some embodiments, a retina tissue-tropic VP capsid polypeptide comprises a 581 to 589 region having one or two conservative amino acid substitutions relative to any one of SEQ ID NO: 14-SEQ ID NO: 1169.

[0188] TABLE 4 provides additional 581 to 589 region sequences predicted to confer retina tissue tropism or preference, based on a primary screen of a recombinant AAV5 capsid library.

TABLE 4
Additional Exemplary 581 to 589 Region
Sequences for Retinal Targeting

| SEQ ID | |
|---|---|
| NO | 581 to 589 Region |
| 1170 | KSRKVKCLK |
| 1171 | KKKYKGHIP |
| 1172 | KKRKKILFM |
| 1173 | KTKCTKTKN |
| 1174 | KRKKAKVIE |
| 1175 | KQKIKKTAF |
| 1176 | KKCGKKRHY |
| 1177 | LCKNKKMKN |
| 1178 | KKKRKGQCP |
| 1179 | KQKTKHWMK |
| 1180 | CSRKAKFKK |
| 1181 | KAKNKACKK |
| 1182 | AKKKTLITK |
| 1183 | RKKKGKPSA |
| 1184 | HRRRAQYRS |
| 1185 | KGKKIKLMM |
| 1186 | TKKPCKYKS |
| 1187 | KKKTKTQIP |
| 1188 | KKTKGKSGT |
| 1189 | CRRRRKIHE |
| 1190 | IKTRKKWKY |
| 1191 | KAKFKKWAS |
| 1192 | KCRKKVKVA |
| 1193 | KKSVKKALV |
| 1194 | KSRKKQVKH |
| 1195 | YMKKHKKGQ |
| 1196 | KKTLKKWLP |
| 1197 | RRRRASCAE |
| 1198 | KGKKRKTAM |
| 1199 | KQKKKQNHQ |
| 1200 | KKYNKKGMW |
| 1201 | VVKHKKKVC |
| 1202 | KKKCKNIFA |
| 1203 | KLNKWKSKQ |
| 1204 | KKKQKCVRG |
| 1205 | AKKAKRWHK |
| 1206 | KKRKLFVKN |
| 1207 | KRKKKNHCR |
| 1208 | KIKKKFDTI |
| 1209 | KVKIKQIKQ |
| 1210 | KKKIKMFCT |
| 1211 | IYKWKKKGT |
| 1212 | KRKGKKFCS |
| 1213 | KKKTCKFEG |
| 1214 | KTRMKRIQV |
| 1215 | QAKKKKQWD |
| 1216 | MKKKQKNVA |
| 1217 | KKRKAHLQW |
| 1218 | IKTKKKWGY |
| 1219 | KCKAFKGYT |
| 1220 | KVHKKKGWH |
| 1221 | RFRKFRRCT |
| 1222 | KSKKTKCLD |
| 1223 | KKKQKQCYF |
| 1224 | KQKKKPAIW |
| 1225 | AKKRRKGSM |
| 1226 | KVGKHLKKG |
| 1227 | TRRRRWCGN |
| 1228 | KKKKKRIFR |
| 1229 | KPKMGKYTK |
| 1230 | ARKKKAGKC |
| 1231 | MTKMKKKMC |
| 1232 | KRARLKHSQ |
| 1233 | KGKKRAKTG |
| 1234 | KQKFFKHAM |
| 1235 | KKKRNRDGL |
| 1236 | RSKQFRVHD |
| 1237 | KRRKPCWRQ |
| 1238 | QTKQKKWKN |
| 1239 | KQRKHKVDT |
| 1240 | KAKSKKGLM |
| 1241 | EVKKKKFMP |
| 1242 | KVKSHKLGQ |
| 1243 | KKKRVQSRD |
| 1244 | KAKRCKASC |
| 1245 | VQKKGWQKK |
| 1246 | KRKWKRDCF |
| 1247 | KAKKSKHDR |
| 1248 | KCKMMKIKC |
| 1249 | KKKKFPECG |
| 1250 | RYKHHRFLP |
| 1251 | KKHRKGQMT |
| 1252 | EWKKKKCFF |
| 1253 | VKKRSKVQA |
| 1254 | RRRRILHCP |
| 1255 | MKKRQRGAS |
| 1256 | KKHKKQLEN |
| 1257 | QTKPKKTKC |
| 1258 | KKKMQCIKC |
| 1259 | QQKEKKWKE |
| 1260 | KTKLYKYCY |
| 1261 | PKKFKVHKC |
| 1262 | YARRAKSTE |
| 1263 | KPVKKQFKE |
| 1264 | RCRSRRYPE |
| 1265 | KRRYRKHNY |
| 1266 | HKRTLKHWF |
| 1267 | RTRRLSPRE |
| 1268 | SKRKKGCVG |
| 1269 | TKPKKKWWA |
| 1270 | QSRKAKRIQ |
| 1271 | RFKSRRSRA |
| 1272 | LVGKKKTGK |
| 1273 | MVKLKKKHH |
| 1274 | KAKYWKHRF |
| 1275 | RPKKVKNCE |
| 1276 | HCRKRRHFH |
| 1277 | VKKMKIWKH |
| 1278 | KVRSKKMWS |
| 1279 | ITKSKKKWT |
| 1280 | KARKKMWSC |
| 1281 | KVKPKSNKS |
| 1282 | KIKRIIVAH |
| 1283 | KKAHAKKVM |
| 1284 | KKKQKRVGH |
| 1285 | RKKGGKLVC |
| 1286 | TKRKHKPVN |
| 1287 | RRKSCRFHR |
| 1288 | KKKYHPKWT |
| 1289 | AAKRQKIQW |
| 1290 | FVRKLKTTT |
| 1291 | YCKLYKKKG |
| 1292 | RRVRKHQRE |
| 1293 | PKLKKKGFS |
| 1294 | CPKNKKKVP |
| 1295 | FKKCKGTKS |
| 1296 | RQRKFKCMQ |
| 1297 | KKHRFKLPV |
| 1298 | DAKKDRYKK |
| 1299 | KKHRSHPSQ |
| 1300 | KMRKTKLWG |
| 1301 | EKKKYCHKT |
| 1302 | DVKKKKWPP |
| 1303 | QVKSKKKQI |
| 1304 | KIRKTKVYN |
| 1305 | KIIKIKKFW |
| 1306 | MKRKLKYAN |
| 1307 | KAKSRQFCQ |
| 1308 | ARARRRYCN |
| 1309 | KKRGYHFQH |
| 1310 | NKKQKCQKV |
| 1311 | VTCKKKSKS |
| 1312 | CIKKCKQWY |
| 1313 | KAQKHLKKC |
| 1314 | VRRKVRRTP |
| 1315 | KSRQKKGPH |
| 1316 | KRKTAKYFQ |
| 1317 | KYKSRKVNS |
| 1318 | YFRARRRYS |
| 1319 | TRRKKKSWN |
| 1320 | KKKPKSHLG |
| 1321 | KRKKSGHFY |
| 1322 | NRRVSRWRK |
| 1323 | QRQKIRRRT |
| 1324 | KMPKQKFKN |
| 1325 | KKNKKCKKP |
| 1326 | DTKRKKSCA |
| 1327 | SKKRHRSHV |
| 1328 | KYKQGGKQY |
| 1329 | KSARKKWSC |
| 1330 | HKKHFKKPL |
| 1331 | GRRKYRADR |
| 1332 | SVKHYKKHQ |
| 1333 | NTKRLKCKQ |
| 1334 | EKKFKKCGG |
| 1335 | KKRYYHRPC |
| 1336 | KGRKIRTQT |
| 1337 | VKKRPKWSK |
| 1338 | QIRRKKAYY |
| 1339 | TCKRKKLNA |
| 1340 | KARSLSRWL |
| 1341 | KLKYIKRSA |
| 1342 | KQRYRKHGQ |
| 1343 | RWRRRQKLQ |
| 1344 | DIKFKKKIF |
| 1345 | HKKKCQNCN |
| 1346 | RMKRYHYTG |
| 1347 | KVKCIKQLG |
| 1348 | RAKRYKHTW |
| 1349 | KGKCMKNAQ |
| 1350 | KNKKRVRGV |
| 1351 | KLKKQPFKG |
| 1352 | LKRKHRRTG |
| 1353 | MKTKTHCKS |
| 1354 | FYKRMRMHN |
| 1355 | HRKFKKQAY |
| 1356 | CKSRKRRGQ |
| 1357 | HKKRTVAWM |
| 1358 | KAKFCRKPQ |
| 1359 | KHRKFRCMT |
| 1360 | RRGRRWVPQ |
| 1361 | CFRKYKNKG |
| 1362 | KWKSKGKNC |
| 1363 | HKHRKQRYV |
| 1364 | RTRRYRHWL |
| 1365 | KTRKGRSNH |
| 1366 | PCRRRRLWG |
| 1367 | KMRKAHVTG |
| 1368 | SRKKCKVCY |
| 1369 | KSKSKYWGV |
| 1370 | KKKSKLFWN |
| 1371 | KKMKCKEAR |
| 1372 | VGKLKKKWQ |
| 1373 | SVKSKKSGL |
| 1374 | FSRKKKLYY |
| 1375 | VNYKKKGKC |
| 1376 | KWRKMKGCY |
| 1377 | KMKSKADKG |
| 1378 | ARKLKRTRF |
| 1379 | KYRKTNVFW |
| 1380 | KNKKEHKSD |
| 1381 | KGKHRKFYA |
| 1382 | KRKLGKFNG |
| 1383 | KKARKGQPW |
| 1384 | TAKRQRIKH |
| 1385 | KRKRTNYWW |
| 1386 | MQRKKKCTG |
| 1387 | KKEKKIWTC |
| 1388 | KQRKRFNSW |
| 1389 | KKKALGFRS |
| 1390 | KVRPKRAGP |
| 1391 | EHRRRRIVG |
| 1392 | KKKKCQAAP |
| 1393 | VKKIKHVKG |
| 1394 | RVRPTRKQC |
| 1395 | KERKQKEMM |
| 1396 | KRKKFMNAR |
| 1397 | RIRKMTRTQ |
| 1398 | KKKPNRIAA |
| 1399 | KKKTIRHNP |
| 1400 | VKKPRGRHP |
| 1401 | RCRKFKSDM |
| 1402 | KSKYAKNQA |
| 1403 | KTCKTKTMF |
| 1404 | HKKCKSQKS |
| 1405 | KGRKYWCGG |
| 1406 | KHKRRTFYP |
| 1407 | KKSKEKAPF |
| 1408 | KTCKKSKIV |
| 1409 | RKKRWHVQY |
| 1410 | KRSRLKRSH |
| 1411 | SKKRYMYKS |
| 1412 | SKVRKRFRV |
| 1413 | CKAKRKSGY |
| 1414 | VCRRIKGRW |
| 1415 | HKTHKKKMT |
| 1416 | KQKKYVMTA |
| 1417 | KRRKQYHCK |
| 1418 | KKATFKQAK |
| 1419 | RIKCKKTTL |
| 1420 | FKKRYLLWT |
| 1421 | KKDRHKHKS |
| 1422 | LARKFKLWH |
| 1423 | TCCKKKKWM |
| 1424 | RRRKIMGHS |
| 1425 | KIKPCKKNH |
| 1426 | KCKQYKMSV |
| 1427 | KQKLOKQAP |
| 1428 | KIKQCKRAW |
| 1429 | KRKKQSVYN |
| 1430 | HCKYHKKGF |
| 1431 | GRRCCRRGF |
| 1432 | TKRLKTRRD |
| 1433 | QRPRKRKGG |
| 1434 | KAKCSKSYC |
| 1435 | RRRKGLMIQ |
| 1436 | GKKKSKLGE |
| 1437 | RKKALKRHG |
| 1438 | SSKRRKQCF |
| 1439 | KMKFQKYAC |
| 1440 | KIRKWSAFE |
| 1441 | KKRRTVHPN |
| 1442 | KAGWLKKEK |
| 1443 | KHKTKHNWE |
| 1444 | DHKRQKRQP |
| 1445 | KYKHRGGYT |
| 1446 | EKKVKKEQW |
| 1447 | MSKRFKTMG |
| 1448 | PMKKKEYKC |
| 1449 | QKKWKFKTC |
| 1450 | EKKPQKKQY |
| 1451 | RGKARRSYA |
| 1452 | KIKRNRSNM |
| 1453 | SKKCGKKDF |
| 1454 | YWKKIKRWN |
| 1455 | KYKQVKKLA |
| 1456 | KQRKCYYKT |
| 1457 | HRRKTRYFR |
| 1458 | NCKGKCVKK |
| 1459 | KTKFRGSKS |
| 1460 | FKRKTRIDG |
| 1461 | KTKCFKGGF |
| 1462 | RVKHYRHYQ |
| 1463 | DKKPKKQYW |
| 1464 | HRKSKKWQP |
| 1465 | RKGKKDCKG |
| 1466 | KSRKHIRTW |
| 1467 | AKQRQRHQP |
| 1468 | MTKSKKRWN |
| 1469 | RRRRYMLIA |
| 1470 | CKKTKTHKF |
| 1471 | KQVKKKKES |
| 1472 | HTKRKGAWM |
| 1473 | KRMKRSRND |
| 1474 | KQRRKCVCY |
| 1475 | KKKCQSFGS |
| 1476 | KKKASGWTT |
| 1477 | EVKSKKRQP |
| 1478 | CRRRLKCGE |
| 1479 | KAKSRGGYN |
| 1480 | LAKYKKSYH |
| 1481 | KCKKCYKCD |
| 1482 | LKKKTKPCG |
| 1483 | EARRKKGWH |
| 1484 | CPRKSKFCM |
| 1485 | MNARVKRVG |
| 1486 | KCKFVKAHT |
| 1487 | KKRNKAQYV |
| 1488 | MVKRNKHYG |
| 1489 | KARWKGRVQ |
| 1490 | CSKKRKAGT |
| 1491 | GVRKTKWCN |
| 1492 | KQKFRGMRY |
| 1493 | VKRKHKFEN |
| 1494 | KGRKWGGTG |
| 1495 | IVKRLKQGA |
| 1496 | SKRKLGQVN |
| 1497 | KYKSQKWTV |
| 1498 | KRTRKKRMV |
| 1499 | MYKLKKTAV |
| 1500 | HRRKWLYPA |
| 1501 | KKKTYSCLS |
| 1502 | KRKRLPYGM |
| 1503 | KRRKNVWCP |
| 1504 | HKRKRYVAV |
| 1505 | KVRVHKMVC |
| 1506 | KWRKEKMHY |
| 1507 | KQKQKKVGP |
| 1508 | KRKAKQGCN |
| 1509 | TNKSKKSQN |
| 1510 | VKRRKIYGA |
| 1511 | KIRLRKGVS |
| 1512 | KCKIVKQMG |
| 1513 | KCRKQHHTM |
| 1514 | RAKIHRYYT |
| 1515 | GKRKHMPCP |
| 1516 | KCKKDRKQC |
| 1517 | QKHRTKKWS |
| 1518 | IKKKFGRCC |
| 1519 | LKRKDKFGE |
| 1520 | KSRKAWLCM |
| 1521 | RFRGHRCWR |
| 1522 | EKRKSKCCP |
| 1523 | KRRKQMHRV |
| 1524 | KQKWWKYGC |
| 1525 | KQKYGKFYN |
| 1526 | NGKLFKKHV |
| 1527 | TTKSFKWRQ |
| 1528 | KKRIHRHEY |
| 1529 | HTKSKKFFS |
| 1530 | KSRSKQRQC |
| 1531 | NVRRYKTHI |
| 1532 | VKKRYHRQQ |
| 1533 | HIRKAKKQC |
| 1534 | KRRRIRHLM |
| 1535 | KKKIGTKCF |
| 1536 | ESKRKRSMN |
| 1537 | YCKLKKIHQ |
| 1538 | NKMSKKKVC |
| 1539 | FFKKRRVCC |
| 1540 | RKKVCRFSN |
| 1541 | SVKMMKTLP |
| 1542 | KVRWKHGGA |
| 1543 | ITRKNKLWQ |
| 1544 | VIRRMRNFF |
| 1545 | RRRRLTPSA |
| 1546 | KNRRKKYAC |
| 1547 | KIRQKCMKF |
| 1548 | ACKNKKKDG |
| 1549 | CFKRRKYMV |
| 1550 | KAKKRANDY |
| 1551 | RRKHMRSKS |
| 1552 | GSRRRKHTH |
| 1553 | KVKMRGFWD |
| 1554 | KGRKRHQYM |
| 1555 | RYKSCKAKG |
| 1556 | RRQRSRYWF |
| 1557 | HIRKQKNNN |
| 1558 | GSRKRKMCT |
| 1559 | RYKCYREYP |
| 1560 | CKKFAKKHD |
| 1561 | KDKMCKAKG |
| 1562 | KRRKTHTKV |
| 1563 | SGKKGKSDN |
| 1564 | HKRKPYSWM |
| 1565 | RHRKKVTHD |
| 1566 | IVKSKKSYI |
| 1567 | QSKTTKKVC |
| 1568 | TKTAKKCKG |
| 1569 | RKGKCKFVY |
| 1570 | KTKRSWCSG |
| 1571 | SSKKPKHCA |
| 1572 | RLRRMWYSG |
| 1573 | HKRRNNWWP |
| 1574 | KCKLQKNNV |
| 1575 | KAKSRRYVE |
| 1576 | KRKFYKCNM |
| 1577 | KKKYCIGHM |
| 1578 | KKKANRATY |
| 1579 | DFKKCKMWQ |
| 1580 | KRKALKVDS |
| 1581 | KKQRFRAAY |
| 1582 | YHRKGKHRN |
| 1583 | HVRSKRHMM |
| 1584 | KFGKQKTLC |
| 1585 | TKRRYHHHC |
| 1586 | KKHRGSFHN |
| 1587 | RMKTRKTCS |
| 1588 | KMKCSKHKD |
| 1589 | GNRRRKYWG |
| 1590 | CYRRYKSYC |
| 1591 | EWKRYRVQS |
| 1592 | LKKTHKKSH |
| 1593 | KLKNKHWFC |
| 1594 | ICHRRRRCH |
| 1595 | PKRKQKWAS |
| 1596 | KHKRSYQAH |
| 1597 | KLKSNKQCC |
| 1598 | KRKKNTFVV |
| 1599 | KRRSYKWIN |
| 1600 | TARKTKQMI |
| 1601 | VARRKRHYT |
| 1602 | HKHRYRYLW |
| 1603 | STRRMTRGM |
| 1604 | MVRRYRSAA |
| 1605 | KAKVRQFSK |
| 1606 | MCKRVRTPP |
| 1607 | HRRKKVTCA |
| 1608 | HQKKQKWPH |
| 1609 | TRKRYVVYA |
| 1610 | KFRKANWPE |
| 1611 | KSRQYKRTW |
| 1612 | EMKKYKKWP |
| 1613 | KLKKKLSEE |
| 1614 | TFKKTKFIP |
| 1615 | CKKKTLAQV |
| 1616 | QKAKYKWCF |
| 1617 | GKRRMRSGW |
| 1618 | KKHKAGGQL |
| 1619 | MAKNKKCGL |
| 1620 | FVKSRRFPN |
| 1621 | KCRKIAHNC |
| 1622 | HRKPRRVHS |
| 1623 | TRRRTKISQ |
| 1624 | RVRHKRRHW |
| 1625 | KVRNWKSMA |
| 1626 | FRRTRRYWS |
| 1627 | VTKYKKKAF |
| 1628 | YKRKQQCAQ |
| 1629 | KRKYHKLCN |
| 1630 | KKRHRVSHT |
| 1631 | LMKAKKKDT |
| 1632 | KYKNKKIVG |
| 1633 | IVKKHKKAE |
| 1634 | DVKFCRYYR |
| 1635 | GYPRRGRRT |
| 1636 | VKKGPRTEK |
| 1637 | TNKSKKCMW |
| 1638 | AFKRFRSDC |
| 1639 | KAKQKGFMN |
| 1640 | AIKAKKVGF |
| 1641 | KTKRRMLRQ |
| 1642 | KGKKHQFSP |
| 1643 | KKKSHKLSM |
| 1644 | KSKIQKIHM |
| 1645 | MSRKKMWRS |
| 1646 | KKYRFNWNH |
| 1647 | KKKCQQCCH |
| 1648 | KIKAFRWQG |
| 1649 | QLKKFKYKA |
| 1650 | RTRKANHGT |
| 1651 | EARKAKMYA |
| 1652 | SVKKWKQRE |
| 1653 | AKGKPKVMC |
| 1654 | RGRKRWVNH |
| 1655 | KSKCFKLQS |
| 1656 | KRQSRKCRG |
| 1657 | KGRGTKYKY |
| 1658 | KIKRMKARC |
| 1659 | MVKSKKKNF |
| 1660 | AVKYYRRQQ |
| 1661 | KHKWKRTSF |
| 1662 | KKKSCICVY |
| 1663 | KGRKCGPMM |
| 1664 | MIRKAKINC |
| 1665 | KAKTKQQWS |
| 1666 | KKSKCHQRC |
| 1667 | TAKRQGLKQ |
| 1668 | KYRQKRCVQ |
| 1669 | KQKVQCSHK |
| 1670 | KWKRHFKGS |
| 1671 | HKKYWKNSA |
| 1672 | KVRSKQWVW |
| 1673 | QKRKYVHKG |
| 1674 | RKKFIKMQC |
| 1675 | PRRRTRLTH |
| 1676 | KIRPKRLEM |
| 1677 | KQKVTKIGS |
| 1678 | FKRKTAVKP |
| 1679 | KVKSGKRAQ |
| 1680 | KLRAARYRG |
| 1681 | KVKPRGMHR |
| 1682 | KVRRHKGVL |
| 1683 | KYKAMKTCG |
| 1684 | LMKFKKQFC |
| 1685 | KKKQKTAHH |
| 1686 | KAKSKWHNF |
| 1687 | KIKRYGSCD |
| 1688 | DAKKWKKCH |
| 1689 | KRRRSKYET |
| 1690 | RIRFIKYAH |
| 1691 | RVKWTRQNQ |
| 1692 | MGRKLKSKE |
| 1693 | KTRKVHIWT |
| 1694 | TKKITKHSS |
| 1695 | VGKRSKISW |
| 1696 | MPKRKRCAS |
| 1697 | NHKSYKRQH |
| 1698 | LKNKTKKQA |
| 1699 | NYKKFKCFQ |
| 1700 | RHRHDRFRH |
| 1701 | KLKIVKWAH |
| 1702 | SYKVKKSAY |
| 1703 | AGKKFKCSI |
| 1704 | SARKKGQVI |
| 1705 | RRRLQKSNS |
| 1706 | MAKTKKYWQ |
| 1707 | KRRKYWRFE |
| 1708 | LWKYKKKFD |
| 1709 | KWKCGKFYS |
| 1710 | KKRSVKSKG |
| 1711 | IAKKHKSGM |
| 1712 | RVNKMKTYP |
| 1713 | RRKSTKNHK |
| 1714 | LARKCKWVC |
| 1715 | SVKKAKWYN |
| 1716 | KWRAIKGQS |
| 1717 | KKTVKRRTG |
| 1718 | KIKMLKGVM |
| 1719 | VHKLNKMKW |
| 1720 | KGKVYKDKQ |
| 1721 | KYKLRKTLF |
| 1722 | IVKLKKCIM |
| 1723 | RKRASKVCN |
| 1724 | KKTRRKKEF |
| 1725 | KKRKLDFCS |
| 1726 | KAARKKSMC |
| 1727 | KARKCTPSH |
| 1728 | MNKKTKYHH |
| 1729 | RKKSRYCHP |
| 1730 | QAKQKKHYH |
| 1731 | TVKKHKDSN |
| 1732 | NVKSKKKFW |
| 1733 | SVKRCKAYT |
| 1734 | KHRKSIWVQ |
| 1735 | NKRKKSQDV |
| 1736 | RRRGWKERC |
| 1737 | KRKYRQNGN |
| 1738 | KFKTPKGWT |
| 1739 | KKKFGGAHW |
| 1740 | AVKRRKCPG |
| 1741 | KRIRKKISS |
| 1742 | IKKSPKKRM |
| 1743 | KARNSRYSI |
| 1744 | MVKPRRSIA |
| 1745 | YTKSKKSAL |
| 1746 | HRKRWHAMH |
| 1747 | KRKNAGRGV |
| 1748 | KAHKRKQAN |
| 1749 | KKARSHWRC |
| 1750 | KMRPSKFHS |
| 1751 | RVRKARSFP |
| 1752 | KARKYGRYL |
| 1753 | RKKRQACWF |
| 1754 | SQKAYRGHS |
| 1755 | HIRKARYDH |
| 1756 | HAKQKHQKQ |
| 1757 | RTKSCKWKH |
| 1758 | KSRKQYAQW |
| 1759 | KGGKKRCKV |
| 1760 | DKPKKKYAA |
| 1761 | KLKSCKQCS |
| 1762 | HTKAYRRES |
| 1763 | KKRLKPTSG |
| 1764 | HKKYRKQWA |
| 1765 | KTKFRKNCT |
| 1766 | TLKCKRKGM |
| 1767 | KSRKHANSG |
| 1768 | KRKRCMIDH |
| 1769 | HKRRITYWM |
| 1770 | ISKAKKTNM |
| 1771 | KFRNRRCAY |
| 1772 | TTKYHKKCW |
| 1773 | RTRKWKWWP |
| 1774 | KTKQLKCTK |
| 1775 | NFRKYKMHN |
| 1776 | KRRRSPYMS |
| 1777 | NAKWIKKWY |
| 1778 | KYRIRRHMC |
| 1779 | GSKNKKQMC |
| 1780 | MLKKGKHHP |
| 1781 | YWKRTRFQF |
| 1782 | IMRKFKRES |
| 1783 | KRKRVAAKD |
| 1784 | KARKQWMHS |
| 1785 | RSKIYRTWE |
| 1786 | SCKKKRMIF |
| 1787 | KTRLKKITR |
| 1788 | TARKRKHTT |
| 1789 | HFKCQKWRF |
| 1790 | KGQRKKSGL |
| 1791 | KSKGKQWYT |
| 1792 | KRRPIRDCF |
| 1793 | TVKKSRLRN |
| 1794 | SMRKFKWKE |
| 1795 | VGKGKKQMC |
| 1796 | QKGLKKHKP |
| 1797 | PSRKLKRLC |
| 1798 | SVRRNKHVY |
| 1799 | FMKRCKMQT |
| 1800 | NKKKFHHAQ |
| 1801 | TNKKFKSVS |
| 1802 | TRRKRPCYP |
| 1803 | NRKRQRNWE |
| 1804 | RAKTSRTEV |
| 1805 | YKPRKRNAT |
| 1806 | CKKKLSRHQ |
| 1807 | KVRKSRGQS |
| 1808 | HQKGKKRGL |
| 1809 | SKKPMKKCC |
| 1810 | KQKKSHSHG |
| 1811 | RIKLQRAMH |
| 1812 | KQKKQLDTT |
| 1813 | THKCKKTGV |
| 1814 | RLKMHRAMC |
| 1815 | KHKCSKFYQ |
| 1816 | NVRNKRAHP |
| 1817 | NKHKPKYHL |
| 1818 | SAKLKKRCN |
| 1819 | KGKNKIGDN |
| 1820 | KLKSKTFAS |
| 1821 | QCKRTKHYK |
| 1822 | YAKPKKYCL |
| 1823 | KRSRMRCFW |
| 1824 | QKKQLKAAA |
| 1825 | LKLRKKHGQ |
| 1826 | KTKKAYVVS |
| 1827 | RSMRIRRDY |
| 1828 | KKKTNTHLG |
| 1829 | KRKYNRSWC |
| 1830 | RRRKQDHVC |
| 1831 | CVKSKKTGY |
| 1832 | SCKSKKSQH |
| 1833 | LRKQKKWTG |
| 1834 | KRRKCPQYE |
| 1835 | KIKNRKSWE |
| 1836 | AGRKAKRVW |
| 1837 | KRRHGHIHS |
| 1838 | KMKNMTMWM |
| 1839 | KRRHNKNYD |
| 1840 | IRMRKKVGG |
| 1841 | VRKHIKRQY |
| 1842 | KKKTSWMGM |
| 1843 | HKRFYKVMW |
| 1844 | HKKRVCRMG |
| 1845 | KVCKFKQSA |
| 1846 | WFKIKRRRS |
| 1847 | KRRNKHPYW |
| 1848 | KTKCNRKAT |
| 1849 | DCKKKGALS |
| 1850 | KGSFKKKMP |
| 1851 | KGRYKQRSS |
| 1852 | HKQRKQQWV |
| 1853 | HKKRENYVF |
| 1854 | VKRKPPRGM |
| 1855 | KAKLYRQFP |
| 1856 | KCRRARSMD |
| 1857 | KATKKFAAT |
| 1858 | SKCNKKKWF |
| 1859 | KSSRKRIYQ |
| 1861 | RRRMRKIAF |
| 1862 | KNKKASIIG |
| 1863 | RKRMAKQPG |
| 1864 | NVRKHKCIH |
| 1865 | KWKRTKIVW |
| 1866 | VGRFGRVGT |
| 1867 | CVKTKKTAP |
| 1868 | KKRSFNCIF |
| 1869 | MQKKTKGCY |
| 1870 | SVKYKKQTN |
| 1871 | KKHKHQINC |
| 1872 | KCKPVRRAE |
| 1873 | IYRRYMRAH |
| 1874 | QCRRGRHQQ |
| 1875 | HKRKWFDKP |
| 1876 | KQRKLGLGE |
| 1877 | KNKIYREIQ |
| 1878 | KQKQTKFGN |
| 1879 | RVKIPIQIR |
| 1880 | NKHRYKCKY |
| 1881 | RKRYSKLNS |
| 1882 | NKHKMRHHN |
| 1883 | KRQRKIWRQ |
| 1884 | KVRRCKLKY |
| 1885 | CSKKSKRQS |
| 1886 | HRKTVKWNA |
| 1887 | KGKSPKLTG |
| 1888 | HIRKHWGSR |
| 1889 | KSKSKSVHD |
| 1890 | NTRKLKNCW |
| 1891 | RNKRRAWNN |
| 1892 | FCKSKRINC |
| 1893 | KRKGQGRTC |
| 1894 | NKCGKKKQP |
| 1895 | RCRRQKVPY |
| 1896 | EKRKKGIHA |
| 1897 | LTRKYKYCT |
| 1898 | KTRRPHQTV |
| 1899 | QVKHFKWTS |
| 1900 | KVKFSKWYK |
| 1901 | QKCKVKYAY |
| 1902 | VKRLKKAVC |
| 1903 | SEKRMKRKG |
| 1904 | KCGRKPINK |
| 1905 | LQKAKKHWQ |
| 1906 | DFKVRKKYP |
| 1907 | KVRHWKCSM |
| 1908 | KSRKQANAE |
| 1909 | KNRLKKRSP |
| 1910 | KHRMFQRSW |
| 1911 | HMRKAKQFT |
| 1912 | RERKLKFQD |
| 1913 | KYKSGKHHW |
| 1914 | KRRHIRRPG |
| 1915 | KWKFKPFSQ |
| 1916 | KRKKQQGYH |
| 1917 | LKRRSPHQY |
| 1918 | IQRKSKCGC |
| 1919 | KGKMKRLET |
| 1920 | VIKFKKCYS |
| 1921 | SVKPRKKAS |
| 1922 | KGGKNKVMV |
| 1923 | MAKSCKCKQ |
| 1924 | KKDKKHLTF |
| 1925 | KSKPRGRGT |
| 1926 | CSKLMKKKP |
| 1927 | KSRKQGISC |
| 1928 | KTKEKKLCY |
| 1929 | QGKSKKWNF |
| 1930 | FKKRMHRKC |
| 1931 | KTKKHGNQQ |
| 1932 | KKKLYWSQP |
| 1933 | TVKKAKRFS |
| 1934 | HKHRSIVKC |
| 1935 | HNKKMRLSG |
| 1936 | CYKSKKLCN |
| 1937 | KVKWRVKPE |
| 1938 | KARFIRHSA |
| 1939 | KKRVGPNVA |
| 1940 | KKNRKAKDY |
| 1941 | KKKWKEWLH |
| 1942 | CHRKVKIVC |
| 1943 | KKKFWTIGN |
| 1944 | MAKRPRLGT |
| 1945 | KLRTMKGLG |
| 1946 | QYKAYKKVQ |
| 1947 | TFRKCKGYW |
| 1948 | NKRKKAFDN |
| 1949 | KKKWTQHMS |
| 1950 | RQKAIKSFH |
| 1951 | KYRGWKSPG |
| 1952 | ANKKRRRAY |
| 1953 | VVKAKKNIM |
| 1954 | KKIKYRKTF |
| 1955 | KKKWQGQAP |
| 1956 | GAKWYKKGM |
| 1957 | RSRPSKQVV |
| 1958 | GTRRNRVQQ |
| 1959 | IRKKSRSKS |
| 1960 | KKKHLHGHS |
| 1961 | GLKKHKMAS |
| 1962 | SKRRTNRAV |
| 1963 | RQKKKMANE |
| 1964 | WRKRCKNTS |
| 1965 | LGRKQKLWH |
| 1966 | AVRYKRRQE |
| 1967 | KQRKSVGRQ |
| 1968 | KWKKQTCFL |
| 1969 | KGKRRWCKC |
| 1970 | CVRRTRWRN |
| 1971 | KRRKTPLHT |
| 1972 | MKKHHRQHW |
| 1973 | YTKSSRKGP |
| 1974 | KQRFFKTGS |
| 1975 | KLKHRGRWH |
| 1976 | HVKGHRRLV |
| 1977 | LKRKQRCQH |
| 1978 | DSKYRRSAR |
| 1979 | KQRKATICS |
| 1980 | EYKKKHKCG |
| 1981 | KIRPKKQVY |
| 1982 | CRKVHRNYC |
| 1983 | KARMKRQKR |
| 1984 | KLKKPRNCY |
| 1985 | KRKWWLMHS |
| 1986 | KIKMHGWRH |
| 1987 | KNKKAKYCS |
| 1988 | KIKKKQLDD |
| 1989 | KRARQKWQA |
| 1990 | RTKNRYWRV |
| 1991 | YKPRHLHKE |
| 1992 | KRPGKRKRN |
| 1993 | KIKLFKQGY |
| 1994 | IKKRMNSSL |
| 1995 | RRRHYKVNS |
| 1996 | KSKMSKHGA |
| 1997 | KLKEHKRMF |
| 1998 | AKKMLKRRG |
| 1999 | QAKIIKKGM |
| 2000 | NHRRKKCQF |
| 2001 | CRRKSKGQC |
| 2002 | KGRGMKWMH |
| 2003 | RWRLKKFQG |
| 2004 | RTRKWQKIW |
| 2005 | WKKRYSLQM |
| 2006 | CKKRYSHGQ |
| 2007 | DAKSKKRAA |
| 2008 | SKKRNQLIQ |
| 2009 | SPRPRKQAM |
| 2010 | VKKKAGLTQ |
| 2011 | HHRKPKYDT |
| 2012 | NRKARRCTD |
| 2013 | IAKWKKCTM |

[0189] In some embodiments, a retina tissue-tropic VP capsid polypeptide comprises a 581 to 589 region having at least 75% sequence identity to any one of SEQ ID NO: 1170-SEQ ID NO: 2013. In some embodiments, a retina tissue-tropic VP capsid polypeptide comprises a 581 to 589 region having at least 77.7% sequence identity to any one of SEQ ID NO: 1170-SEQ ID NO: 2013. In some embodiments, a retina tissue-tropic VP capsid polypeptide comprises a 581 to 589 region having at least 85% sequence identity to any one of SEQ ID NO: 1170-SEQ ID NO: 2013. In some embodiments, a retina tissue-tropic VP capsid polypeptide comprises a 581 to 589 region having at least 88.8% sequence identity to any one of SEQ ID NO: 1170-SEQ ID NO: 2013. In some embodiments, a retina tissue-tropic VP capsid polypeptide comprises a 581 to 589 region having a sequence of any one of SEQ ID NO: 1170-SEQ ID NO: 2013. In some embodiments, a retina tissue-tropic VP capsid polypeptide comprises a 581 to 589 region having one or two amino acid substitutions relative to any one of SEQ ID NO: 1170-SEQ ID NO: 2013. In some embodiments, a retina tissue-tropic VP capsid polypeptide comprises a 581 to 589 region having one or two conservative amino acid substitutions relative to any one of SEQ ID NO: 1170-SEQ ID NO: 2013.

[0190] Retinal Pigment Epithelium Tissue-Tropic AAV VP Capsid Polypeptides. Described herein are engineered AAV VP capsid polypeptides comprising a variant 581 to 589 region predicted to confer increased retinal pigment epithelium (RPE) tissue tropism, and predicted to confer increased retina tissue tropism compared to a wild type AAV VP capsid polypeptide (e.g., an AAV5 VP capsid polypeptide), based on a primary screen of a recombinant AAV5 capsid library. In some embodiments, an RPE tissue-tropic engineered AAV VP capsid polypeptide may also have tropism for choroid tissue. TABLE 5 provides 581 to 589 region sequences predicted to confer RPE tissue tropism or preference.

TABLE 5
Exemplary 581 to 589 Region
Sequences for RPE Targeting

| SEQ ID | |
|---|---|
| NO | 581 to 589 Region |
| 2014 | DCTFHDAEI |
| 2015 | TDEHVKMGP |
| 2016 | GTVWKNWPD |
| 2017 | NIEPTANCQ |
| 2018 | DEMAHYASS |
| 2019 | WINYTVKDR |
| 2020 | EFDQCTHGI |
| 2021 | QIYVTHQGP |
| 2022 | GTVNEYSWN |
| 2023 | VRYACLYEN |
| 2024 | WFDHNYCFG |
| 2025 | EYCPCGEVQ |
| 2026 | DRPCAVHEA |
| 2027 | VCVNRLECP |
| 2028 | TEQKQYESI |
| 2029 | TDNCKGECQ |
| 2030 | CNTQFMKRE |
| 2031 | MMIQNHCLS |
| 2032 | AVTAPTFRG |
| 2033 | FYTNAGCYC |
| 2034 | AQQSWEQIQ |
| 2035 | MHMNQCVID |
| 2036 | IHTIEQKCS |
| 2037 | IKLDVEMAG |
| 2038 | AHCTKTMQV |
| 2039 | MPQQNVAVP |
| 2040 | MQYFWHYAH |
| 2041 | AYESKIHTG |
| 2042 | MSLWCSEER |
| 2043 | LATAHSMRF |
| 2044 | VWYFYNEAP |
| 2045 | VQMAVLAYW |
| 2046 | VVLTQLEDS |
| 2047 | NQMFNNEYP |
| 2048 | HTYGSLAQY |
| 2049 | NTFMECVGG |
| 2050 | VKQMGCDIA |
| 2051 | HGQCALHTV |
| 2052 | MIGTFAYHQ |
| 2053 | VNPTKAEYA |
| 2054 | LMLGAYKEC |
| 2055 | MGEPTCEYR |
| 2056 | LTVMWGCCY |
| 2057 | PNHCYSTWN |
| 2058 | DLHAYICFI |
| 2059 | WVTMHNQLC |
| 2060 | GMEYYAHNW |
| 2061 | PPNVTVDQE |
| 2062 | QPDTVWHYA |
| 2063 | VSWVERACP |
| 2064 | CPPDHCYTA |
| 2065 | NTQSQACYI |
| 2066 | EYWFTHAEN |
| 2067 | PLEVWQTYT |
| 2068 | LVTMADHHA |
| 2069 | STENHHFEN |
| 2070 | DALTDFEGC |
| 2071 | EHCDGWRIS |
| 2072 | AQQAVEEVQ |
| 2073 | MITNLFMAG |
| 2074 | NKTDGHYQC |
| 2075 | DGLNEEMWK |
| 2076 | TQLRDMISS |
| 2077 | SEQRTNHYA |
| 2078 | HVTDHQGGI |
| 2079 | HQCCGLVMQ |
| 2080 | AQNGFDKDL |
| 2081 | VFQAFMRSM |
| 2082 | FSCPKDGYA |
| 2083 | NGGMFELTL |
| 2084 | QNDTLEHFY |
| 2085 | DQLQKDFYF |
| 2086 | TSDATCQWI |
| 2087 | ATNENIMAW |
| 2088 | EPAQKAGIS |
| 2089 | QTALRWNWD |
| 2090 | ELEPVVCQW |
| 2091 | NACTHNTFT |
| 2092 | HADANTKTY |
| 2093 | PEYSTDHPN |
| 2094 | YAVTDQEGH |
| 2095 | AIFMHPLTE |
| 2096 | AWQGATHEA |
| 2097 | QTYFMHTSA |
| 2098 | TASHVAEFK |
| 2099 | IHPVQFCKC |
| 2100 | QHMISHDKA |
| 2101 | IYTHCWHEY |
| 2102 | IAEPHYTAA |
| 2103 | TDMIVKEQC |
| 2104 | NNQPPDGAC |
| 2105 | QIEPTPEHT |
| 2106 | EILVYMYFH |
| 2107 | MMCNKIHDE |
| 2108 | MVFTRFDHN |
| 2109 | LWECATCNP |
| 2110 | NVEMGPRAM |
| 2111 | CANMEDTDY |
| 2112 | PDKACQMID |
| 2113 | SHGEKCMSV |
| 2114 | EFTLFDSDR |
| 2115 | ETLFYNAFA |
| 2116 | VTLISHCKC |
| 2117 | LNCCYKEMT |
| 2118 | TCTSCVHDY |
| 2119 | FTCIWFRWA |
| 2120 | MHPSTSVTC |
| 2121 | QKNHFEMQQ |
| 2122 | NDLYKANYN |
| 2123 | TVFQMQMCN |
| 2124 | PEHCEAWPV |
| 2125 | DVEMFFMVG |
| 2126 | MLYWCLQNG |
| 2127 | YTGWLMSDM |
| 2128 | HCVVMQRMY |
| 2129 | LHDVAAENR |
| 2130 | EEEHCAKLG |
| 2131 | HTMYVDTAN |
| 2132 | CLDWLHREY |
| 2133 | PPCETAHTY |
| 2134 | GVHTKMIAW |
| 2135 | HDVCMSYKS |
| 2136 | NLPQPVLMM |
| 2137 | IPGDYVNLS |
| 2138 | TSTVFHNWC |
| 2139 | DKLDINMTL |
| 2140 | CHYQGEHIP |
| 2141 | TYEVNCENA |
| 2142 | NFDTQPKAI |
| 2143 | MCMPADQTL |
| 2144 | AKETWDCVG |
| 2145 | PGPAHVDHI |
| 2146 | ATIVTQHGC |
| 2147 | GMYIMKEHQ |
| 2148 | PTHATTMVQ |
| 2149 | DVYAMVRPC |
| 2150 | ESHPLWHDL |
| 2151 | QSVMASTAN |
| 2152 | NEGVCSYVQ |
| 2153 | HIYSCDQSN |
| 2154 | STTKHENGH |
| 2155 | GQQPYNRME |
| 2156 | ITVTKCSDV |
| 2157 | VADTCCDMM |
| 2158 | DKHLTCQQA |
| 2159 | VEAVLFTAI |
| 2160 | VEPCRWYTD |
| 2161 | CSQSTCKMT |
| 2162 | YIAQPVDMA |
| 2163 | HICDMPKGR |
| 2164 | TIYPRLPLT |
| 2165 | QHSNLTRPC |
| 2166 | EKACCFTHL |
| 2167 | ASEENLMVK |
| 2168 | MKYTAWMDG |
| 2169 | VQYACLYEN |
| 2170 | EATLNDNHC |
| 2171 | ACNLVYADS |
| 2172 | NALNIHNLT |
| 2173 | CWILHMRSA |
| 2174 | GLDVWPWET |
| 2175 | QTAEVKACN |
| 2176 | VHTCMYGMT |
| 2177 | WVMAHNLPS |
| 2178 | PEAGYQSEC |
| 2179 | HAQMMLSGN |
| 2180 | IHFACMVMH |
| 2181 | AWQMQVNGP |
| 2182 | NFQITEAGQ |
| 2183 | CEDSFYKFD |
| 2184 | IMTSQMYPA |
| 2185 | RSELYGMTL |
| 2186 | QTLMVLRNM |
| 2187 | EHLYGDIVY |
| 2188 | MEQQMKMMF |
| 2189 | EFELDTKLC |
| 2190 | TINVQNFPT |
| 2191 | TQVLEEMAW |
| 2192 | TSFSASHWG |
| 2193 | QTIYRFNAA |
| 2194 | VIDPRHDGY |
| 2195 | NEWNQCQAH |
| 2196 | TTVNNHDGW |
| 2197 | CAYQKHGYV |
| 2198 | QTHWQYCRV |
| 2199 | SQARICSYC |
| 2200 | TNNFRMIAS |
| 2201 | TRMQADNMH |
| 2202 | NLDNKNEGP |
| 2203 | RWVGLWCAD |
| 2204 | DRQAMVKTD |
| 2205 | NAQHRSQAP |
| 2206 | EKLMLHQSV |
| 2207 | LVICMQSST |
| 2208 | TVHHGFADP |
| 2209 | KSTCETDIQ |
| 2210 | NQCFHCAWN |
| 2211 | NMPMTQNGH |
| 2212 | LFGMMPQMK |
| 2213 | TIHPFSASR |
| 2214 | FGMQDHCVC |
| 2215 | FGPLLGTIP |
| 2216 | AQGRYASQC |
| 2217 | VIHQEWPCT |
| 2218 | ETPNNEQTH |
| 2219 | QRMYLDHCL |
| 2220 | SSGCWYQLG |
| 2221 | TNEHQMVPW |
| 2222 | RSYVQDFEQ |
| 2223 | EIHVKFRYD |
| 2224 | GIHAMIVSE |
| 2225 | QNEICECYL |
| 2226 | IGVCWNYAD |
| 2227 | DENGYSAPF |
| 2228 | PMIMHQLAG |
| 2229 | DASMWGFHT |
| 2230 | DLSTFNHWY |
| 2231 | QVHQLTESV |
| 2232 | EIVNWLERE |
| 2233 | IFDWANWHY |
| 2234 | CEDILTTAA |
| 2235 | NSYPPGQGA |
| 2236 | TTSPRMMYQ |
| 2237 | TFSFVLDQD |
| 2238 | PLDRINMPF |
| 2239 | TAHSTMWGW |
| 2240 | EIGPDQDTC |
| 2241 | ELHITCLYS |
| 2242 | MNFLFEVSY |
| 2243 | MHGNQHAHK |
| 2244 | EFMNHSNAA |
| 2245 | ETDPTNRID |
| 2246 | GQLVECAAS |
| 2247 | NQHDFIRHF |
| 2248 | WAETGFCME |
| 2249 | VTHQIQRGF |
| 2250 | YRDPWVQCS |
| 2251 | LCNATWADP |
| 2252 | HLWPDTCFQ |
| 2253 | TVPEEYLRP |
| 2254 | GIGCAETAH |
| 2255 | SHDICCKFE |
| 2256 | SHNTCESIE |
| 2257 | ASDPFQMSM |
| 2258 | VFYMGHCCY |
| 2259 | YQAQCAMSG |
| 2260 | FQWCTQLGC |
| 2261 | IMTSWTKIC |
| 2262 | MQNAIARHA |
| 2263 | SVIHFGSYT |
| 2264 | GWQDMMQMP |
| 2265 | LCHADGRCS |
| 2266 | WLMDNTFPW |
| 2267 | LMGYCQKNM |
| 2268 | HQNWDNGAP |
| 2269 | ERFCELHKA |
| 2270 | CSLRTCFGG |
| 2271 | PTCAHNYRT |
| 2272 | LMDHTCKCD |
| 2273 | YTSDAAHQV |
| 2274 | SIQKEDNQH |
| 2275 | YQFPRESVI |
| 2276 | MINGPKCYY |
| 2277 | IANQKGLTV |
| 2278 | SFISWAELC |
| 2279 | RSGYQDWMH |
| 2280 | VHLPDTRNV |
| 2281 | DSGWHHACQ |
| 2282 | FVTTITTHY |
| 2283 | YGDANWAVM |
| 2284 | PVTILADEY |
| 2285 | LNYAGYCRP |
| 2286 | MNIYHENLS |
| 2287 | VTLTCNTNA |
| 2288 | FANASGFWR |
| 2289 | ITNDHNHLW |
| 2290 | DKLHGQREY |
| 2291 | SNTLLCKMV |
| 2292 | QISNVTANN |
| 2293 | GNQWYQCTA |
| 2294 | EIWACYTHG |
| 2295 | DWLQEHNGN |
| 2296 | ETYKSAEWG |
| 2297 | GICMPQEHA |
| 2298 | IHFFNLDHC |
| 2299 | CQELYGIHD |
| 2300 | QHQHVFKDS |
| 2301 | AHCVDMDTW |
| 2302 | NTADKWRLG |
| 2303 | YWHEMLSWP |
| 2304 | SACPSENRE |
| 2305 | PNWQCLEHD |
| 2306 | FLHAVWARP |
| 2307 | TNHWDHRSG |
| 2308 | SHVCRLSAE |
| 2309 | LVCVASSAC |
| 2310 | YVGMIPVHP |
| 2311 | PQSSHIGDT |
| 2312 | GSTIQNRHA |
| 2313 | DHLCFPINE |
| 2314 | TTLALGDYG |
| 2315 | PVHEWKSHQ |
| 2316 | KCASYTEPP |
| 2317 | EWELCNTTT |
| 2318 | EVACNKMMQ |
| 2319 | HTMSTTLVY |
| 2320 | STEACNYGS |
| 2321 | SLMCMEHTY |
| 2322 | TTGIYMCDQ |
| 2323 | FAMVMHDQP |
| 2324 | SRHCCLEFS |
| 2325 | TWNIACGRH |
| 2326 | EVHFSRITC |
| 2327 | FHTNYFWEG |
| 2328 | MTEYKVGFY |
| 2329 | DICDFCRQF |
| 2330 | VTMTVFHPF |
| 2331 | HTELDGCYV |
| 2332 | AWGMACTTW |
| 2333 | WISMTVGAP |
| 2334 | FANYCVAMP |
| 2335 | NILALCEGT |
| 2336 | DRLTHCCEP |
| 2337 | HCDYHVCKG |
| 2338 | HSVIKESCE |
| 2339 | MSMQKMLDN |
| 2340 | VLHQCAIEV |
| 2341 | ANVTMQHQY |
| 2342 | GPVDKAGAN |
| 2343 | KEDSKASNP |
| 2344 | DTPSYKCNW |
| 2345 | LHHFHMKHA |
| 2346 | ATNQVIRHM |
| 2347 | WSASDPYSM |
| 2348 | KEEFVHQQW |
| 2349 | CYQDIQHMV |
| 2350 | DHMEMCSSA |
| 2351 | YPVWVKVQN |
| 2352 | LPQQKNEWY |
| 2353 | TNAEFYMMR |
| 2354 | FWQLIDSAL |
| 2355 | YPVGLYQGI |
| 2356 | CTFPMHGVG |
| 2357 | GDNVCCYPQ |
| 2358 | TVGTMINAY |
| 2359 | DGSERQNAY |
| 2360 | ENFCIYKDS |
| 2361 | EHGMKYQHP |
| 2362 | GATPFEKMN |
| 2363 | HNIWLETGW |
| 2364 | TSHQKFMGS |
| 2365 | LTGSDGQSS |
| 2366 | CEVQCPFDC |
| 2367 | QVWACYLPS |
| 2368 | WFTFFMAGA |
| 2369 | TPKMEICQA |
| 2370 | DNNWMYQAD |
| 2371 | THALSMKGT |
| 2372 | IACLEQATF |
| 2373 | GVNWYINSF |
| 2374 | TIVDWVHMG |
| 2375 | TRLDMAMDA |
| 2376 | PEHPVGYTT |
| 2377 | TEGLFEWGW |
| 2378 | NNPTKTCTT |
| 2379 | CLIQQDVVC |
| 2380 | LWECYYCNS |
| 2381 | PVGIWPSIE |
| 2382 | LREFLTVQT |
| 2383 | LADGQFMGN |
| 2384 | AYQLKVFFN |
| 2385 | WVDNLMRHS |
| 2386 | NAEFEGCVT |
| 2387 | SVTVFWHPG |
| 2388 | MHAPANTQD |
| 2389 | ASYCIHRSY |
| 2390 | TKSEPCLDC |
| 2391 | GEVRMSANY |
| 2392 | EVYSHDSQY |
| 2393 | EQMSNDASY |
| 2394 | YPHAYMVTG |
| 2395 | SAIPFIRHG |
| 2396 | HGGPQVMRS |
| 2397 | NVRECHALV |
| 2398 | TAGMMQYCD |
| 2399 | CEHEMSSYY |
| 2400 | HDNGTNKKM |
| 2401 | MIPAWNVTQ |
| 2402 | AYVSAPRID |
| 2403 | IANQNESSW |
| 2404 | NTFMLELDS |
| 2405 | MITQWMHHR |
| 2406 | ADNVQWSEC |
| 2407 | SITCPSQTC |
| 2408 | FVDPWEWTR |
| 2409 | PCLQIGMQQ |
| 2410 | APCNKTHSW |
| 2411 | DGPSDFKTC |
| 2412 | VNAPPSHVE |
| 2413 | CPNEMVHYK |
| 2414 | VSNEWEASD |
| 2415 | TWNPRCWQP |
| 2416 | FCEQFGSLC |
| 2417 | LQCFLANRE |
| 2418 | RMDMHNNST |
| 2419 | YCNFIVNAM |
| 2420 | PTHTKGNEN |
| 2421 | NNFEQRVGH |
| 2422 | IMGYLWTQN |
| 2423 | YSAWMREFN |
| 2424 | DLFNIIQMD |
| 2425 | FVSNQTKWE |
| 2426 | QCLPLHNHC |
| 2427 | GVGFIPTPY |
| 2428 | DFVSNWDKF |
| 2429 | PQIICMMTV |
| 2430 | RPDHEQEST |
| 2431 | THLFHKEHA |
| 2432 | TGNMAYNCG |
| 2433 | MHDQRMYTW |
| 2434 | VVGWLTHQA |
| 2435 | MILQKNMER |
| 2436 | QVEQCLKED |
| 2437 | LKISPVNER |
| 2438 | AYEFCKNED |
| 2439 | IFEHHNRYP |
| 2440 | DAYTFINGC |
| 2441 | EACLHGFSE |
| 2442 | VMGQMAYQY |
| 2443 | LNSLVVQGK |
| 2444 | HLDPCGWAG |
| 2445 | TYSDKIVNT |
| 2446 | SFGACYQFA |
| 2447 | TQQAFFCVR |
| 2448 | EQMWNHHET |
| 2449 | VKPADANAG |
| 2450 | AIPTFHRAG |
| 2451 | NWIVSAKQQ |
| 2452 | GMYACQMEW |
| 2453 | CGHMSHRSQ |
| 2454 | GVCCNHNQI |
| 2455 | SLGPVNMTS |
| 2456 | TVAGEQMEP |
| 2457 | SLLWAVWLD |
| 2458 | CAVIGVENP |
| 2459 | GVQLIWAGL |
| 2460 | HNYASGWVT |
| 2461 | DHIWRHEAG |
| 2462 | PKLQDVERC |
| 2463 | GWPNQSYIC |
| 2464 | ENENTWHSG |
| 2465 | DKQHTVSAM |
| 2466 | PTGFWPYVH |
| 2467 | GCTMCYMYC |
| 2468 | FTIPQVRYS |
| 2469 | AEEIVYESW |
| 2470 | TTNAPCEIN |
| 2471 | ISDQFGSWI |
| 2472 | IVHGTATAE |
| 2473 | TATIVKQHW |
| 2474 | MICQNMSHT |
| 2475 | LIKPANGEC |
| 2476 | KDFNSELTN |
| 2477 | TPEEPVRGG |
| 2478 | NQMFDQNEY |
| 2479 | YLQVSMQGY |
| 2480 | NHVRNVEQC |
| 2481 | TIMHTQRGA |
| 2482 | FVSQPGYAV |
| 2483 | SMYVMPFWL |
| 2484 | VMILSNHGC |
| 2485 | VWGPFHLTR |
| 2486 | YGYHEDMMC |
| 2487 | TSTAESARD |
| 2488 | NTAHLYGFD |
| 2489 | PFSPKAQVA |
| 2490 | INCYSYNEF |
| 2491 | MKHMPMTDN |
| 2492 | HTHCVLAEH |
| 2493 | MVTTLAGND |
| 2494 | IYVQKHSDW |
| 2495 | PAFLDGVEG |
| 2496 | MTPGRHVLS |
| 2497 | CDQWLQCYQ |
| 2498 | AADSRGVPN |
| 2499 | AWCSFQHIK |
| 2500 | MQMAYYQSH |
| 2501 | QKVCHMTAI |
| 2502 | TNWRTDVNG |
| 2503 | EINEWTIAN |
| 2504 | FTEFYQAHD |
| 2505 | SEKCWPDYQ |
| 2506 | GYTGNDESS |
| 2507 | WFSQNGWAH |
| 2508 | QCALETPIP |
| 2509 | DEILRYSFQ |
| 2510 | KAVITESAC |
| 2511 | ALSAWGMPS |
| 2512 | VIWSVEHAE |
| 2513 | NAHLKMTAS |

[0191] In some embodiments, an RPE tissue-tropic VP capsid polypeptide comprises a 581 to 589 region having at least 75% sequence identity to any one of SEQ ID NO: 2014-SEQ ID NO: 2513. In some embodiments, an RPE tissue-tropic VP capsid polypeptide comprises a 581 to 589 region having at least 77.7% sequence identity to any one of SEQ ID NO: 2014-SEQ ID NO: 2513. In some embodiments, an RPE tissue-tropic VP capsid polypeptide comprises a 581 to 589 region having at least 85% sequence identity to any one of SEQ ID NO: 2014-SEQ ID NO: 2513. In some embodiments, an RPE tissue-tropic VP capsid polypeptide comprises a 581 to 589 region having at least 88.8% sequence identity to any one of SEQ ID NO: 2014-SEQ ID NO: 2513. In some embodiments, an RPE tissue-tropic VP capsid polypeptide comprises a 581 to 589 region having a sequence of any one of SEQ ID NO: 2014-SEQ ID NO: 2513. In some embodiments, a retina tissue-tropic VP capsid polypeptide comprises a 581 to 589 region having one or two amino acid substitutions relative to any one of SEQ ID NO: 2014-SEQ ID NO: 2513. In some embodiments, a retina tissue-tropic VP capsid polypeptide comprises a 581 to 589 region having one or two conservative amino acid substitutions relative to any one of SEQ ID NO: 2014-SEQ ID NO: 2513.

### Ocular Tissue-Tropic Sequences Generated by Machine Learning

[0192] Additional 581 to 589 regions that confer ocular tissue tropism may be generated using machine learning algorithms trained with sequences identified in ocular tissue in in vivo screens. The machine learning algorithms may be employed to identify patterns in amino acid sequences that favor accumulation in ocular tissue (e.g., retina, RPE, or both) as compared to other tissues (e.g., non-ocular tissues). Alternatively or in addition, the machine learning algorithms may be employed to identify patterns in amino acid sequences that favor accumulation in ocular tissue as compared to a wild type AAV capsid (e.g., comprising a VP capsid polypeptide of SEQ ID NO: 1). These patterns may be used to generate new sequences of 581 to 589 regions that confer ocular tissue tropism to VP capsid polypeptides and rAAVs assembled from the VP capsid polypeptides. In some embodiments, new sequences of 581 to 589 regions may be generated by randomly sampling amino acid residues at each position of 581 to 589 regions that favored ocular tissue tropism in an in vivo screen. The generated sequences may be tested using classifiers (e.g., gradient boosting classifiers or random forests classifiers) to predict ocular tissue-specificity for each 581 to 589 region. The 581 to 589 regions with the highest predicted ocular tissue-specificity may be identified as ocular tissue-tropic sequences.

[0193] Disclosed herein are engineered AAV5 VP capsid polypeptides capable of forming an assembled virion that exhibits increased ocular tissue tropism as compared to a wild type AAV VP capsid polypeptide (e.g., a VP1 of SEQ ID NO: 1, a VP2 of SEQ ID NO: 10, or aVP3 of SEQ ID NO: 11), wherein the engineered variant AAV5 VP capsid polypeptide sequence has one or more amino acid substitutions in a 581 to 589 region of the VP capsid polypeptide, corresponding to positions 581 to 589 in SEQ ID NO: 2 (X¹X²X³X⁴X⁵X⁶X⁷X⁸X⁹). In some embodiments, X¹ is selected from A, R, N, D, C, E, Q, G, H, I, L, K, M, F, P, S, T, W, Y, or V. In some embodiments, X² is selected from A, R, N, D, C, E, Q, G, H, I, L, K, M, F, P, S, T, W, Y, or V. In some embodiments, X³ is selected from A, R, N, D, C, E, Q, G, H, I, L, K, M, F, P, S, T, W, Y, or V. In some embodiments, X⁴ is selected from A, R, N, D, C, E, Q, G, H, I, L, K, M, F, P, S, T, W, Y, or V. In some embodiments, X⁵ is selected from A, R, N, D, C, E, Q, G, H, I, L, K, M, F, P, S, T, W, Y, or V. In some embodiments, X⁶ is selected from A, R, N, D, C, E, Q, G, H, I, L, K, M, F, P, S, T, W, Y, or V. In some embodiments, X⁷ is selected from A, R, N, D, C, E, Q, G, H, I, L, K, M, F, P, S, T, W, Y, or V. In some embodiments, X⁸ is selected A, R, N, D, C, E, Q, G, H, I, L, K, M, F, P, S, T, W, Y, or V. In some embodiments, X⁹ is selected from A, R, N, D, C, E, Q, G, H, I, L, K, M, F, P, S, T, W, Y, or V.

[0194] In some embodiments, provided herein are AAV5 VP capsid polypeptide having at least one mutation in a 581 to 589 region, wherein said at least one mutation drives increased ocular tissue tropism.

[0195] Retina Tissue-Tropic AAV VP Capsid Polypeptides. Described herein are engineered AAV VP capsid polypeptides comprising a variant 581 to 589 region predicted to confer increased retina tissue tropism compared to a wild type AAV VP capsid polypeptide (e.g., a wild type AAV5 capsid polypeptide of SEQ ID NO: 1), generated and selected using machine learning. TABLE 6 provides 581 to 589 region sequences predicted to confer retina tissue tropism or preference.

TABLE 6
Additional Exemplary 581 to 589
Region Sequences for Retinal Targeting

| SEQ ID | |
|---|---|
| NO | 581 to 589 Region |
| 2514 | HKKRARQRP |
| 2515 | HKKKKKQEP |
| 2516 | HKKKARTRP |
| 2517 | HKKRKRVRP |
| 2518 | HKRRARVQP |
| 2519 | AKRRKKRRN |
| 2520 | HKRKKKRRT |
| 2521 | HKRRARYRP |
| 2522 | HKKKGRMRP |
| 2523 | HKRKKKRRP |
| 2524 | HKKRKKQRV |
| 2525 | TKKRKRICP |
| 2526 | HRKRGRVKP |
| 2527 | HKKKARQKT |
| 2528 | HKKRKRLRS |
| 2529 | AKKKKRMRP |
| 2530 | HKKRYKQRP |
| 2531 | HKKRGREQP |
| 2532 | HRRRKKQRP |
| 2533 | HKKKKKQKP |
| 2534 | HDRKKKFRP |
| 2535 | HKKRKRKRP |
| 2536 | HKRKKKLET |
| 2537 | HKKRGRTRW |
| 2538 | HCRRARSYP |
| 2539 | HKKKAKQRP |
| 2540 | HKKRARHKD |
| 2541 | HCKRKKVRS |
| 2542 | HSRRARVQP |
| 2543 | TKKRKRTQW |
| 2544 | HKKRKRMKS |
| 2545 | HKKRKRQKW |
| 2546 | HDKKARSKP |
| 2547 | HKKRKRQRP |
| 2548 | HCRRARMRC |
| 2549 | HKKKKRVAS |
| 2550 | HKRKKRQAY |
| 2551 | APKRKKFRP |
| 2552 | HLRKAKTAP |
| 2553 | AKKKKKFRP |
| 2554 | HKKKGRMKP |
| 2555 | HDRRGKQRP |
| 2556 | HLPRQRVKP |
| 2557 | TDKKKKQCW |
| 2558 | TKKKKKHCP |
| 2559 | SKKKGRERP |
| 2560 | HDKRGKMKP |
| 2561 | KLKRARTQP |
| 2562 | MKKRKRQAW |
| 2563 | HLKRAKFRT |
| 2564 | HKKRKREKP |
| 2565 | MKKRKKQRN |
| 2566 | HDKKKRQRE |
| 2567 | HRRRKKQKC |
| 2568 | HRRRKRLQP |
| 2569 | HGRRAKVRP |
| 2570 | HKKKKRANP |
| 2571 | HKRKKKTRP |
| 2572 | AKRRARTKP |
| 2573 | HKKRLRMRP |
| 2574 | AKKRKRSRP |
| 2575 | HPKRAKAKP |
| 2576 | HKKRKRHKP |
| 2577 | HRRRKKLKN |
| 2578 | HDKKKRVKP |
| 2579 | HQKKKRLQP |
| 2580 | HKKRARFQS |
| 2581 | HKRKKKIKP |
| 2582 | HKKRKRQEP |
| 2583 | HKKRARHRP |
| 2584 | HKKRLKHIW |
| 2585 | HKKKKRMRP |
| 2586 | HCKKKRVRY |
| 2587 | HKKRKRSGN |
| 2588 | HKKKKKARP |
| 2589 | ARKRKKLKP |
| 2590 | SKKKGRQKP |
| 2591 | HKKRDKQRP |
| 2592 | HKKRKRMRY |
| 2593 | HKKRKRHRT |
| 2594 | HPKRKKLAP |
| 2595 | HKRRARQRP |
| 2596 | HKRKKRTRC |
| 2597 | HDKRKRHRW |
| 2598 | QPKRKRVAP |
| 2599 | CDKKKKTRP |
| 2600 | HKRRKKLRP |
| 2601 | HKRKARTRP |
| 2602 | HRKKLKSKP |
| 2603 | HKKKLRVRP |
| 2604 | MDKKGKTCW |
| 2605 | HKKRARVEP |
| 2606 | MKKRGRTPP |
| 2607 | HKRRKRTRN |
| 2608 | AKKKKREKL |
| 2609 | HCRRAKQRE |
| 2610 | HKKKLRMRW |
| 2611 | HPKRKRTRD |
| 2612 | HKKKSKQKP |
| 2613 | HQRRKKKKP |
| 2614 | TKKRKRVKA |
| 2615 | HKKRLRVKP |
| 2616 | HKKKKKVRP |
| 2617 | TKKRKRVRS |
| 2618 | HCRRGKVRC |
| 2619 | HKRRKRMRP |
| 2620 | HKKKKRQAW |
| 2621 | HKKKKRLRP |
| 2622 | HKKKKKRCS |
| 2623 | HDRKKKTKP |
| 2624 | HKKRKRHGP |
| 2625 | HKRRARKRP |
| 2626 | HKKKKKVRC |
| 2627 | HKRKKRQRP |
| 2628 | HKKRKRDRP |
| 2629 | HKKKAKFQP |
| 2630 | HDKRKRTRN |
| 2631 | HKKKKRFNP |
| 2632 | TKKKKRQKW |
| 2633 | ALKKKRQKP |
| 2634 | HKKRLRFKP |
| 2635 | AKKKKRQRP |
| 2636 | HRKRAKVAP |
| 2637 | HCKKKKQIP |
| 2638 | AKKRKRQKW |
| 2639 | HKKKGKHRV |
| 2640 | HKKRDRMCS |
| 2641 | HKKRARLKP |
| 2642 | AKRRKKAKP |
| 2643 | TLKRKRTKP |
| 2644 | HKKRARLAY |
| 2645 | HKKRKRRRW |
| 2646 | HLKKKRKQN |
| 2647 | HKKRKKLRP |
| 2648 | HKRKKKFGP |
| 2649 | EKKKSKMQP |
| 2650 | HCKRAKTRP |
| 2651 | TKKKKRHKN |
| 2652 | HKRRKKERW |
| 2653 | HKRRGKQRP |
| 2654 | HKKRKRTKP |
| 2655 | AKKRAKQRP |
| 2656 | HKKKGRTRP |
| 2657 | HCRRKKVRW |
| 2658 | HKKRKRFKP |
| 2659 | HKKKKRHKP |
| 2660 | HEKRKRFKP |
| 2661 | HKKKKRTRV |
| 2662 | HPRKAKCRD |
| 2663 | HKKRAKQRT |
| 2664 | HKKRARHQT |
| 2665 | HKKRKRHRL |
| 2666 | HRRKAKTRT |
| 2667 | HKKKKRTYW |
| 2668 | HKKRKRLRC |
| 2669 | HKKRKKQRP |
| 2670 | TKKRKRLRP |
| 2671 | HDKRKRVKP |
| 2672 | HDRRKKTAP |
| 2673 | HKRKKKVRP |
| 2674 | AKKKKRQKP |
| 2675 | HLRKKRLRP |
| 2676 | HKKRKRQKP |
| 2677 | HKRKKRQRW |
| 2678 | KDKKKRVRP |
| 2679 | HDRRKKFKH |
| 2680 | TKKKKRMRP |
| 2681 | HKRRKRRGW |
| 2682 | HKRKSRTRP |
| 2683 | HRKRKRVCP |
| 2684 | MKKRKRQRP |
| 2685 | HKKKKKQRP |
| 2686 | HRKKKRVKS |
| 2687 | TKKRARQRA |
| 2688 | MKKKGRVRP |
| 2689 | HRKRGRMRA |
| 2690 | MKKRKRVVP |
| 2691 | HKKRKRLRY |
| 2692 | HCKKKRQRP |
| 2693 | HDRKKKVQP |
| 2694 | HCKRAKTGP |
| 2695 | TPKRKRLRS |
| 2696 | HKKRGRVRP |
| 2697 | TKKRKRQRY |
| 2698 | MRRRGRSRP |
| 2699 | HKKKKKQCP |
| 2700 | HKRKKKDQT |
| 2701 | HCKKARFRP |
| 2702 | HDKRLKQRW |
| 2703 | HLKRKRTRE |
| 2704 | HKKRKRTRW |
| 2705 | HKRKKRFNV |
| 2706 | CDKKLRFFP |
| 2707 | KKRRARQGP |
| 2708 | TKKRSKVRS |
| 2709 | HDKRLRHKE |
| 2710 | AKKKKKVWW |
| 2711 | HKKKKRLRW |
| 2712 | HKKRLKQKN |
| 2713 | HKKRKRLRV |
| 2714 | HKKKKKERP |
| 2715 | HKKRKRSQP |
| 2716 | HKKRARVRP |
| 2717 | HKKKKKFRT |
| 2718 | AKKKGKLRQ |
| 2719 | QKKKGRDRS |
| 2720 | HERKKKLRP |
| 2721 | HKRKKKTKE |
| 2722 | HKKRKKVKP |
| 2723 | HKKRARLRW |
| 2724 | MKKKKRVRP |
| 2725 | HKKRARLRS |
| 2726 | HQRRAKTRP |
| 2727 | HRKKLRQKP |
| 2728 | HDKKKKMMP |
| 2729 | HKRRKRICP |
| 2730 | HRRKKKQKM |
| 2731 | TRKRSRVIN |
| 2732 | HKKRKKRRW |
| 2733 | HKKRKRRVP |
| 2734 | HKKRKRMRP |
| 2735 | TKRRARVRT |
| 2736 | HKKRKRVAP |
| 2737 | HPKRKRHRP |
| 2738 | SKKKKRFAP |
| 2739 | TLRKKRQRP |
| 2740 | KKRKKRKGN |
| 2741 | HKKRKRTRP |
| 2742 | HKKRKRHNP |
| 2743 | HKKKGRHQC |
| 2744 | HKKKKRSRP |
| 2745 | HDKRKKQKP |
| 2746 | HKKRKKQRE |
| 2747 | HKKKGKVKP |
| 2748 | HLKKKKKQP |
| 2749 | HPKKKKLRP |
| 2750 | HRKRAKVRC |
| 2751 | HDKKKRLRP |
| 2752 | TKKRKKDKE |
| 2753 | HKKRARQRY |
| 2754 | MKKRARLRC |
| 2755 | HKKRARFRL |
| 2756 | HKKRGRIRP |
| 2757 | HQKKCKTCP |
| 2758 | HPKRARTRP |
| 2759 | MKKKKRQCN |
| 2760 | HLKKKRWRW |
| 2761 | HKKKKRLKN |
| 2762 | HKKRKRART |
| 2763 | HKKRKKMRP |
| 2764 | HKRRKRRRS |
| 2765 | HQRRKKLRN |
| 2766 | HKRKKRLRN |
| 2767 | HKKRKRMKP |
| 2768 | HKKKKRVPY |
| 2769 | KDKKKKLKP |
| 2770 | AKKKARMKW |
| 2771 | TCKKAKMCP |
| 2772 | HKKKLKMWP |
| 2773 | HDRKKKQIW |
| 2774 | HKKKKRMCP |
| 2775 | HKKKLRQRP |
| 2776 | TKKRKRQRP |
| 2777 | AKKRKRQAP |
| 2778 | KQKKKREWP |
| 2779 | AKKRARQKP |
| 2780 | HCRKKKTRY |
| 2781 | AKKRLKVQP |
| 2782 | HCKKKKQRP |
| 2783 | KKKRKKRRP |
| 2784 | ADRRAKVRP |
| 2785 | HGKKGRVRP |
| 2786 | HKRKAKVRN |
| 2787 | HLKKKRRKT |
| 2788 | HEKRKRERP |
| 2789 | HCRRKKERP |
| 2790 | TKKRKRTAP |
| 2791 | HLRRARLKN |
| 2792 | HKRRKRHRW |
| 2793 | HKRKKRQQQ |
| 2794 | HDRRGKTQP |
| 2795 | TDKRGKQKP |
| 2796 | AKKKKRHKM |
| 2797 | HKRKKKMRP |
| 2798 | HKKRKRLRH |
| 2799 | HCKKARRKP |
| 2800 | HRKRLRQRP |
| 2801 | HKKRGRVKP |
| 2802 | HKKRKKDKS |
| 2803 | MKKRKRHQH |
| 2804 | HKKRKKVKD |
| 2805 | HDKRARQRP |
| 2806 | HDKRKRVWP |
| 2807 | AKKRKKHRP |
| 2808 | TRKKKRVKP |
| 2809 | HKRRKRHRP |
| 2810 | HKKRLRLRP |
| 2811 | HKKKKKLRI |
| 2812 | HRKRLRSRP |
| 2813 | HKRRKKERP |
| 2814 | HKRRKRLRT |
| 2815 | HKKRKRHRN |
| 2816 | HKRRKKLRW |
| 2817 | HKKRSKQRP |
| 2818 | HDKRKRVRP |
| 2819 | HKKKKRVKP |
| 2820 | IKRKKRHYP |
| 2821 | HRKRAKQQP |
| 2822 | HDKRKKMRD |
| 2823 | HDKKLRFRW |
| 2824 | AKKRSRWRC |
| 2825 | HKRRKRQKP |
| 2826 | HERKKRVRP |
| 2827 | HKKRKRTRV |
| 2828 | HKKRLRVRP |
| 2829 | HKRKKKHRP |
| 2830 | HKKRARHRS |
| 2831 | HRKRKRLRP |
| 2832 | HKKRKRTYY |
| 2833 | YKKKKKVCS |
| 2834 | KKKRKRQRW |
| 2835 | HKKRKRVKP |
| 2836 | HKKRKKVRS |
| 2837 | HDKRKKMQP |
| 2838 | TKKKAKQKP |
| 2839 | HKRKKRWRW |
| 2840 | HKKRKRFRP |
| 2841 | QQRKARHRP |
| 2842 | HCRKDKQQP |
| 2843 | HKRKLKWKP |
| 2844 | HKKKKRQKP |
| 2845 | HKKRKRTCP |
| 2846 | TKKKSKTRP |
| 2847 | HKKRGRMRP |
| 2848 | HKRKKKLKC |
| 2849 | HKKKKRFKP |
| 2850 | HRKRARLKP |
| 2851 | HRKKGKQRP |
| 2852 | TRKRKRMRD |
| 2853 | HQKKKRQLP |
| 2854 | CKRKKRFCP |
| 2855 | HPKRKRQYP |
| 2856 | HEKRAKHCP |
| 2857 | HKRRKRQQP |
| 2858 | HKKRKRLND |
| 2859 | HKKRGRQQH |
| 2860 | HKKKSRHRP |
| 2861 | HKKRKRMYP |
| 2862 | HKKRARSRW |
| 2863 | HDKKAKFRP |
| 2864 | HKRRAKQRP |
| 2865 | HKRLLKDRP |
| 2866 | HKKRARQRL |
| 2867 | HKKKKRMKP |
| 2868 | HKRKKRVRW |
| 2869 | HKKKLRMRP |
| 2870 | IKKRARMRP |
| 2871 | HKKRKKLCP |
| 2872 | HKKRKRFCP |
| 2873 | HKKRKKTLA |
| 2874 | TKKRKRVCP |
| 2875 | HPRKKKLRP |
| 2876 | HKKRAKFQP |
| 2877 | ACRKGKQAW |
| 2878 | HPRRKRTKP |
| 2879 | HQRRARLRP |
| 2880 | IKKRKRTRP |
| 2881 | HRKKKKDKS |
| 2882 | HKKRKRQRW |
| 2883 | HKKRKRRRM |
| 2884 | HPKRKKQRP |
| 2885 | HQKRGRCRP |
| 2886 | HPKRARFRP |
| 2887 | HKKKKRQRY |
| 2888 | AKRRAKARP |
| 2889 | HKRKKRQKN |
| 2890 | HKKRAKSQT |
| 2891 | SDKRKRMKT |
| 2892 | HKRKKRKRP |
| 2893 | HKKRKRMRW |
| 2894 | HDKRARTRP |
| 2895 | MDKKKRQKP |
| 2896 | HKKKKRTAD |
| 2897 | HKRKKRLKP |
| 2898 | HKKRKRLKP |
| 2899 | HKKRARTRP |
| 2900 | TKKRARVKP |
| 2901 | HDKRKKLNT |
| 2902 | HKKKGRHRP |
| 2903 | TKKRARFRP |
| 2904 | HKKRKRFNP |
| 2905 | HDKRKRTRP |
| 2906 | TDKRKRFRP |
| 2907 | HKKRKKFQP |
| 2908 | HKKRKRVQC |
| 2909 | HKKKKRQRP |
| 2910 | TRKKKKMKN |
| 2911 | TKKRKRMRS |
| 2912 | HKRRKRTKP |
| 2913 | TRKRARVKP |
| 2914 | TKKKKRMGY |
| 2915 | HKKRGKVRP |
| 2916 | KKKRKRQCV |
| 2917 | HRKRKRTRP |
| 2918 | HDRRAKRAY |
| 2919 | HKKKKRERY |
| 2920 | HKKKKRHRW |
| 2921 | HKRKKKVRY |
| 2922 | HKKKLKTQS |
| 2923 | HPKRKRMCP |
| 2924 | HRKRKRMRP |
| 2925 | HRKRARVKP |
| 2926 | HDKRKRMRP |
| 2927 | HRKKKKVRP |
| 2928 | HCRRAKFLP |
| 2929 | HDRRKRLRP |
| 2930 | HKKRKRFKS |
| 2931 | HCRKKRFRP |
| 2932 | HKKRARQRS |
| 2933 | HKRKKRQKP |
| 2934 | HRRRKRFHW |
| 2935 | HKKKKRVRP |
| 2936 | HKRRKKTRT |
| 2937 | HPKRKRTRP |
| 2938 | HKKKARSRP |
| 2939 | HKKKKKTNN |
| 2940 | HKRRARARP |
| 2941 | HCRKAKQQP |
| 2942 | HPKRAKQIP |
| 2943 | HKKRKRLQP |
| 2944 | HKKKKKGKP |
| 2945 | HKKRKKMCP |
| 2946 | HDKKGRVKP |
| 2947 | HKKRKRVRC |
| 2948 | HKKRKRMDS |
| 2949 | HKRKKRFRS |
| 2950 | HRKKKRHKW |
| 2951 | HQKKKRFRP |
| 2952 | HKRRDRTKP |
| 2953 | HDKKKRMNP |
| 2954 | HKKRSRDRE |
| 2955 | HDKKKKQRC |
| 2956 | TKKKKRFCS |
| 2957 | HEKRGKHRP |
| 2958 | HKKRKRFRW |
| 2959 | PKKRKRMRW |
| 2960 | AKKRSKQQY |
| 2961 | AKKKKRMKW |
| 2962 | AKKKARVIP |
| 2963 | HKKKARQRP |
| 2964 | HKKRKKVNP |
| 2965 | TPKKKRLQN |
| 2966 | HKKRKRLAN |
| 2967 | YKKRKRQRL |
| 2968 | HRRKTRMRS |
| 2969 | HKKRKRQAW |
| 2970 | KKKKKRHRP |
| 2971 | HKKRGKEKP |
| 2972 | AKKRKRQRP |
| 2973 | HKKSAKDRP |
| 2974 | HKKRQRQAP |
| 2975 | HDKKKKFQW |
| 2976 | HKKKKKQRW |
| 2977 | AKKRKRQKP |
| 2978 | HKRRARVKP |
| 2979 | HSRRARMRT |
| 2980 | HKTRARFKP |
| 2981 | AKKRKRLCQ |
| 2982 | ACKRKRMKP |
| 2983 | HCKRARVKP |
| 2984 | HRRRKRGRS |
| 2985 | HKKRARVQP |
| 2986 | HSKRARQGW |
| 2987 | HKKRAKHRC |
| 2988 | HDKKKRHKP |
| 2989 | HKKRARVKD |
| 2990 | HKKRKKVRP |
| 2991 | AKRKKRVKP |
| 2992 | HKRRKKTAY |
| 2993 | HKKKARHRP |
| 2994 | ARKRARQQP |
| 2995 | IKKRGRVRY |
| 2996 | HEKKARVKP |
| 2997 | HKRRKKRRT |
| 2998 | HKRRKRQRP |
| 2999 | TKKRDRHYP |
| 3000 | HDKRAKQRP |
| 3001 | HKKRKRLRW |
| 3002 | HSKKKKFCP |
| 3003 | HKKRKKQRW |
| 3004 | HCKRAKARC |
| 3005 | HKKKKKQQP |
| 3006 | AKRKKKQRP |
| 3007 | HQKRKKDQP |
| 3008 | HKKRKRSKY |
| 3009 | HKRRKKTQP |
| 3010 | HKRRKRTKW |
| 3011 | HDKRARERP |
| 3012 | HKKKKKHKT |
| 3013 | AKKRKRFRP |
| 3014 | KKKRARMRP |
| 3015 | HKKRARHEP |
| 3016 | HKKRAKERP |
| 3017 | HKKRCKSNP |
| 3018 | HKKRARFMP |
| 3019 | HKRSKRQRW |
| 3020 | HLKKKKAKP |
| 3021 | HKKRKKHRP |
| 3022 | HRKRKKQRP |
| 3023 | HKKKKKQKN |
| 3024 | HKRRDRKQP |
| 3025 | HCKKKKQKW |
| 3026 | HKKRKRVRS |
| 3027 | HDKKKKTGN |
| 3028 | EKKRKRHRT |
| 3029 | TKKKKKVRP |
| 3030 | HKRKKKVKP |
| 3031 | HKKRKREQP |
| 3032 | HKKRKKLKW |
| 3033 | HKKRDRTKP |
| 3034 | HKKRKKQNY |
| 3035 | HKRRKRRRH |
| 3036 | ADKKAKVAP |
| 3037 | HCRKKKQRP |
| 3038 | HKKKAKLQP |
| 3039 | HKKKGRFRY |
| 3040 | HDKRKRFKP |
| 3041 | HKRRLRQRP |
| 3042 | HPKRKRERP |
| 3043 | HKKKLKTCP |
| 3044 | HKKKGKQAP |
| 3045 | HKKRKKMRN |
| 3046 | HKKRKKSRN |
| 3047 | TKKRKKVRP |
| 3048 | HDKKARTKP |
| 3049 | HCKRAKQRP |
| 3050 | HRKRARTRP |
| 3051 | ACKRGRLRP |
| 3052 | HKKRKRHRP |
| 3053 | AKKKKRVRP |
| 3054 | TKKRKRVRP |
| 3055 | HKRKARHKN |
| 3056 | HKKKGRLRP |
| 3057 | HQKKGKVKP |
| 3058 | HKKKKKQRT |
| 3059 | AKKRKRRRY |
| 3060 | HKKRGRHKY |
| 3061 | HKKRKKVCP |
| 3062 | HRKKKRQRP |
| 3063 | HDKKSKQRP |
| 3064 | HKRRKRQWP |
| 3065 | AKKRKRLRP |
| 3066 | HKRRKRQPP |
| 3067 | HDKKKKMKV |
| 3068 | HCRRAKTRW |
| 3069 | HCKKKKMRP |
| 3070 | TCRKGKQRP |
| 3071 | HKKRARFKS |
| 3072 | SPKRKRFRS |
| 3073 | ADKKKRHKP |
| 3074 | HDKRARSRP |
| 3075 | HKKKKKQQM |
| 3076 | HKKRGRVQP |
| 3077 | HKRKKKDCQ |
| 3078 | HKKKKKFKP |
| 3079 | HKKKARLQP |
| 3080 | ARKRARVRP |
| 3081 | HQKRGRVYP |
| 3082 | HKKRKRVRY |
| 3083 | HKKKKKLRP |
| 3084 | TKKKKRVRP |
| 3085 | HLKRARQRP |
| 3086 | TKKKKKQRP |
| 3087 | QKKRKKQEW |
| 3088 | HKKRKRRRH |
| 3089 | HKRKKRVRP |
| 3090 | HCKRKRMQS |
| 3091 | HKKRKRTRY |
| 3092 | HKKRKHQKP |
| 3093 | HEKKAKTQT |
| 3094 | HDKKKKTRP |
| 3095 | TKRKGRDKS |
| 3096 | HKKRARVKP |
| 3097 | HCKRKRVRE |
| 3098 | HKKRKRFVL |
| 3099 | TRKRAKVQP |
| 3100 | TKKKKRRIP |
| 3101 | HRKRKRRRP |
| 3102 | HEKKKRQKP |
| 3103 | HKKKGRMRY |
| 3104 | HCRKGRQKY |
| 3105 | HDKRKRTKE |
| 3106 | HQRSAKQCC |
| 3107 | HRKRKRFRP |
| 3108 | HKKKLRVQW |
| 3109 | HKRRARFRP |
| 3110 | HDRRKKQRP |
| 3111 | HKRRKRVAP |
| 3112 | KKKRKRQKP |
| 3113 | HKKKARVKP |
| 3114 | HKRRARMRT |
| 3115 | HKKKAKVKP |
| 3116 | MQKKKRHRP |
| 3117 | HKKKKKVKT |
| 3118 | TDRRLKTIP |
| 3119 | HKRKKRTKW |
| 3120 | HKRKLKQRP |
| 3121 | TKKKKRQRP |
| 3122 | APKRGRFIP |
| 3123 | HRKKLRFKP |
| 3124 | HKKRARVKT |
| 3125 | KKRKKRQRP |
| 3126 | HKKKKRQQP |
| 3127 | HKRRKRSYS |
| 3128 | HCRRAKVKC |
| 3129 | QKKRGRRKW |
| 3130 | HRRKGRQRT |
| 3131 | HKRRKRFRN |
| 3132 | HQRRAKLQY |
| 3133 | HLKRARVRP |
| 3134 | HKKKKRLKP |
| 3135 | HKKKKRTCP |
| 3136 | HDRKKKTRP |
| 3137 | HKKKKKFRA |
| 3138 | HDKRARFQP |
| 3139 | HRKRGRTKS |
| 3140 | HRKRKRHRP |
| 3141 | HEKKGREAP |
| 3142 | HKRKGRVCP |
| 3143 | HKKKGKKRP |
| 3144 | HKKRKKCRN |
| 3145 | HKKRARVRT |
| 3146 | KQKRKRFRS |
| 3147 | HKRKKKDRP |
| 3148 | HRKRSRVRP |
| 3149 | HDKRARVRP |
| 3150 | HKKRLRFRN |
| 3151 | HKKRKRRNW |
| 3152 | HQKRKRTRP |
| 3153 | HKKRGKMKW |
| 3154 | HKKKGKYRN |
| 3155 | HKKKKRMRS |
| 3156 | HKKKKRQCE |
| 3157 | HKKKKRFEP |
| 3158 | HLKRKKSKP |
| 3159 | HCKKCRHRP |
| 3160 | HKKKKRQRE |
| 3161 | HDKRKRLRP |
| 3162 | HPKSARQRP |
| 3163 | HCKRKKLRP |
| 3164 | HDRKKRQRP |
| 3165 | HKRRKREKP |
| 3166 | HKKRKKRSW |
| 3167 | AKKRKRVQT |
| 3168 | HKRRAKQGW |
| 3169 | ADKRKKMRP |
| 3170 | HLKRKRFRP |
| 3171 | TKKRGRTNP |
| 3172 | HKRKKRTRP |
| 3173 | HKKRKRALP |
| 3174 | HKRKKRMRN |
| 3175 | KKKKKKQRW |
| 3176 | HKKRKRVQP |
| 3177 | HKKRKRVCP |
| 3178 | AKRKKKDIP |
| 3179 | HKRKGKMRP |
| 3180 | HKRRKKDQW |
| 3181 | HDKRAKTKP |
| 3182 | HKKKKRVRW |
| 3183 | HKKRKRTKA |
| 3184 | HDRRKRQRW |
| 3185 | HKRKAKERP |
| 3186 | HKKKKRHRP |
| 3187 | HKKKSRVRP |
| 3188 | HKRRKKQKP |
| 3189 | HCRRKRLRP |
| 3190 | HQRRGRLRT |
| 3191 | HKKRKRVRN |
| 3192 | AEKKARTQW |
| 3193 | TKKRKRAKE |
| 3194 | AKKRARQRP |
| 3195 | HRKKKRTAP |
| 3196 | HKKRKRLRP |
| 3197 | PKRKKRQRN |
| 3198 | HKRKKKTRW |
| 3199 | HRKRKRQRW |
| 3200 | TKKRKRRGT |
| 3201 | HKRRKKQGP |
| 3202 | HKKKKKHRW |
| 3203 | HDKKKRERP |
| 3204 | HEKRLKFKW |
| 3205 | IKKRKRMCY |
| 3206 | HKKKKHQRP |
| 3207 | HKKRKRHKC |
| 3208 | HRKKKRQKP |
| 3209 | HDKRKRSRP |
| 3210 | HKKKGRQIP |
| 3211 | HKRRKRTRP |
| 3212 | HRKKKRARP |
| 3213 | HKKRLKRRW |
| 3214 | HCKRKKLAP |
| 3215 | HKKRKKTRW |
| 3216 | HKKRGHQRP |
| 3217 | HKKRKRFQS |
| 3218 | HKKKKRSKP |
| 3219 | HKRKKKVKA |
| 3220 | HKKKKKHRP |
| 3221 | TLKRARVKP |
| 3222 | HKKKKKFQP |
| 3223 | HPRRKRKRP |
| 3224 | AKKRARVRP |
| 3225 | HKKKKRQRT |
| 3226 | HKRKKRTRM |
| 3227 | HRKRSRKRT |
| 3228 | HCRRKKQKP |
| 3229 | HKKRKRQGP |
| 3230 | HKKKLKQRN |
| 3231 | MKKKKRLKW |
| 3232 | HRKKKKQKW |
| 3233 | HKKRKRTKY |
| 3234 | MKKRKKHRC |
| 3235 | TKKRAKMRP |
| 3236 | HRRKKKLRW |
| 3237 | TKKRARSNP |
| 3238 | HKKKTRHRP |
| 3239 | HKRKKRFPP |
| 3240 | HKKKKRAKW |
| 3241 | HKRKKKARP |
| 3242 | HKKRKRHVW |
| 3243 | HDRKKKTRE |
| 3244 | HKKRKRFPP |
| 3245 | HLRKARIEP |
| 3246 | HRRKARQRN |
| 3247 | HCKKKKQRS |
| 3248 | HKKRSRCKP |
| 3249 | HGKKKKQQW |
| 3250 | AKKKLRQRP |
| 3251 | HKKRGRQRP |
| 3252 | AKRKKRKRE |
| 3253 | HKKRKKTRP |
| 3254 | QKRRKRVRP |
| 3255 | HKKRKRQRH |
| 3256 | HKKRGKFCP |
| 3257 | HKKRKRQRS |
| 3258 | HKKKKRIRP |
| 3259 | HKKRAKQRP |
| 3260 | SKKRKRHRP |
| 3261 | IKKRKRVEP |
| 3262 | TKKRKKMRN |
| 3263 | AKKKKKFGS |
| 3264 | TQKKGRVKP |
| 3265 | HDKRGRQRC |
| 3266 | HKRRKRMRW |
| 3267 | HKKRKRTQP |
| 3268 | HKKKKKVKP |
| 3269 | HKKKKKMCW |
| 3270 | HKRRKKQND |
| 3271 | HKKRKRVGP |
| 3272 | YKKRGRMRP |
| 3273 | KPKKKRFRG |
| 3274 | AKKRKKQKS |
| 3275 | HKRRKKWRP |
| 3276 | HRKRKRLGY |
| 3277 | HKRKDKVRT |
| 3278 | HKRKKKHRW |
| 3279 | HKRRKRRRP |
| 3280 | HKKKGRART |
| 3281 | AKKRARWIP |
| 3282 | MKRRKKLRP |
| 3283 | HKRKKKFKW |
| 3284 | TRKRKRVCP |
| 3285 | HQKKAKTEP |
| 3286 | HKRKLKVRP |
| 3287 | IKRRKRMHW |
| 3288 | HKKKKKQKV |
| 3289 | QCKRGRMRP |
| 3290 | HQRKKKHKC |
| 3291 | HKKKAKTRT |
| 3292 | HKKRKRVRE |
| 3293 | TPKRLRMAP |
| 3294 | HCKKARVKP |
| 3295 | TKRRKRFRP |
| 3296 | KDRKKKQRT |
| 3297 | HKRKKRMRP |
| 3298 | HKKKLRQKA |
| 3299 | TDPRGRQKP |
| 3300 | HDKKARQRP |
| 3301 | HKRKKRAWW |
| 3302 | HKKRKRMRC |
| 3303 | HKKRLRLRT |
| 3304 | TKKKNKMGP |
| 3305 | HKRRKRFRY |
| 3306 | HKKRKKTKW |
| 3307 | HDKKARLVP |
| 3308 | HKRRAKTAP |
| 3309 | HORRKKFNN |
| 3310 | HKKKKRLCW |
| 3311 | HKKRKRFRC |
| 3312 | EKKKKRVKP |
| 3313 | HKKRKKQKP |
| 3314 | TKKKKKQKP |
| 3315 | HKKRKKQQN |
| 3316 | HKKRGKAKW |
| 3317 | AKKKGRHRP |
| 3318 | HKKRKRRRP |
| 3319 | AKKRARTRW |
| 3320 | AKKKKRQCN |
| 3321 | HRKRKRTAY |
| 3322 | HKRKKRFIP |
| 3323 | TKKRKRTKP |
| 3324 | KDKKAKTQP |
| 3325 | HKKKKRHRC |
| 3326 | HRKKKKTWT |
| 3327 | AKRKGRLFP |
| 3328 | HKKKKHTNP |
| 3329 | HKKRLRVRW |
| 3330 | HKKRKRQRL |
| 3331 | HKRRARQRY |
| 3332 | HCKKARSKP |
| 3333 | HKKKKKRNH |
| 3334 | HKKRSRLKP |
| 3335 | HDKRAKQQP |
| 3336 | HRKRGRLNP |
| 3337 | HKKKAKARP |
| 3338 | HKKRARMKP |
| 3339 | HKKRGKVEY |
| 3340 | HRKRQRARP |
| 3341 | HPKKKKQKP |
| 3342 | TVKRARVAT |
| 3343 | HDRKLRQRP |
| 3344 | HEKRKRMAP |
| 3345 | HKKRSRMRP |
| 3346 | HDKKKKLRP |
| 3347 | HKRKGRGRP |
| 3348 | HKKKAKVAS |
| 3349 | TKKRGRQCP |
| 3350 | HCKKKRQKS |
| 3351 | AKKRAKQKS |
| 3352 | HGKRKKVHT |
| 3353 | HRKKKKVPP |
| 3354 | SCKRGRTRP |
| 3355 | HPKKKRVRP |
| 3356 | HKKRKRFWH |
| 3357 | HKKKKKFRP |
| 3358 | HQKRKRVRA |
| 3359 | HKKKARARP |
| 3360 | HKKRKRFGP |
| 3361 | HRKRKKMRP |
| 3362 | ADRKKRMRN |
| 3363 | AKRRKRHAP |
| 3364 | HKKRKKTNC |
| 3365 | HQKRDKQRT |
| 3366 | HRKRKRQRC |
| 3367 | HQKRKRVKP |
| 3368 | AKKRKRVRP |
| 3369 | HKRKKRHKC |
| 3370 | AKKRSRVHP |
| 3371 | HRKRKRHRW |
| 3372 | HKKRKRFRT |
| 3373 | TKKRKRVQP |
| 3374 | AKKRKKVKP |
| 3375 | HKKRGRHRS |
| 3376 | HRKKKRLRW |
| 3377 | SKRKKRFKD |
| 3378 | HDKRGRTKP |
| 3379 | HERKKRERP |
| 3380 | AKKRKRVAP |
| 3381 | HKKRLHVRE |
| 3382 | HKKRGRLRP |
| 3383 | HPKRKRVKP |
| 3384 | HKKRSRQRP |
| 3385 | HRKKKRTRP |
| 3386 | AKKRLRHRS |
| 3387 | HQKKKRTRW |
| 3388 | HKKRKRGKY |
| 3389 | HDKRARFRY |
| 3390 | TKCRKRVRP |
| 3391 | TRKKKRVCP |
| 3392 | HKKRKRVWY |
| 3393 | HQKKLRSKP |
| 3394 | HKKRLRVRN |
| 3395 | HLRKAKTKP |
| 3396 | HKRKKRHKP |
| 3397 | HKRKARQRE |
| 3398 | HKKRARHKP |
| 3399 | HKRKAKQAV |
| 3400 | HDKRKRTQP |
| 3401 | HQKKKRVKP |
| 3402 | HPKRLRSRA |
| 3403 | HCKRGRVRP |
| 3404 | HLRKKRLKP |
| 3405 | MKKRKRVRP |
| 3406 | KKKKLKFQY |
| 3407 | HKRKGKQRP |
| 3408 | HDKKKKQRP |
| 3409 | TKKRARQRP |
| 3410 | HKRKKKLQL |
| 3411 | MKKRKRRRP |
| 3412 | HKKRGKDCW |
| 3413 | PKRRGRTAP |
| 3414 | HECRGRFRP |
| 3415 | HRRRKRARP |
| 3416 | AKKRKRHRP |
| 3417 | HDKRGRHRN |
| 3418 | AKRRARVKP |
| 3419 | HCRKKKQRY |
| 3420 | HKKKKRFRH |
| 3421 | HKKRKRHRS |
| 3422 | HKKRSRVRP |
| 3423 | HKKRGRSRT |
| 3424 | HKKKKRTKW |
| 3425 | MKKKKRFRP |
| 3426 | ADKKKKMRP |
| 3427 | HRKRKRFKS |
| 3428 | HKTRSRQKY |
| 3429 | IKKKKRMRP |
| 3430 | TKKRKRFKW |
| 3431 | TKKKAKLKC |
| 3432 | SDKRGRMCP |
| 3433 | HKKRAKVKP |
| 3434 | HKKKGRQRI |
| 3435 | HLKKGKLRP |
| 3436 | HKKRAKFKH |
| 3437 | KKKKKRTRI |
| 3438 | HKKRAKQKP |
| 3439 | YKKKKKMKN |
| 3440 | HKKKKRKRP |
| 3441 | HKKRKKDKP |
| 3442 | HDRRKRLKP |
| 3443 | AKKRSRVRP |
| 3444 | HKKKKRFKW |
| 3445 | HKKRKRFRN |
| 3446 | AKKKKRVCS |
| 3447 | HKRRKRFIP |
| 3448 | MEKRKRLRP |
| 3449 | HKRKAKDRW |
| 3450 | HRRRARMEP |
| 3451 | HKKRLREKT |
| 3452 | KPKKKRMKN |
| 3453 | QKRRKRRRC |
| 3454 | HRKKARVRW |
| 3455 | HKRRARLRP |
| 3456 | HKKRKRFWT |
| 3457 | HKKKKRLAP |
| 3458 | HRKKKKQRN |
| 3459 | HKKRKKARP |
| 3460 | HKKRLRTKP |
| 3461 | HEKRKREQP |
| 3462 | HCKRKRVRW |
| 3463 | HKKKKKSRP |
| 3464 | TKKKDRHKP |
| 3465 | HKRKLRFRP |
| 3466 | HEKRKKARD |
| 3467 | AKKKKRFRP |
| 3468 | HQRKARMKT |
| 3469 | AKKRKRQKN |
| 3470 | AKRKLRMRW |
| 3471 | MKKRKKFKN |
| 3472 | HKRKARLRS |
| 3473 | HDKRKKQQP |
| 3474 | HKKKKRRCM |
| 3475 | HKKRGRGRW |
| 3476 | HPKRKRTCP |
| 3477 | ACKKKKQQP |
| 3478 | PKKRGRTQP |
| 3479 | HKKRKKERP |
| 3480 | HKRRKRRRW |
| 3481 | SKKRKRMRP |
| 3482 | HLKKGRHRP |
| 3483 | TKKKDKHKC |
| 3484 | AQKKAKARP |
| 3485 | AKKRSKQRP |
| 3486 | HCRKARQQP |
| 3487 | HKRRSRLKW |
| 3488 | HDRRKRSAA |
| 3489 | HKRRTRVRP |
| 3490 | EKRRKRVQP |
| 3491 | HDRKKKTQC |
| 3492 | SKRRKRFGP |
| 3493 | HQKKLKERP |
| 3494 | HLKRKRVKP |
| 3495 | HPKRKKQQW |
| 3496 | HKRKKKTRL |
| 3497 | HPKRLKVRP |
| 3498 | HKKKKRTQW |
| 3499 | HRKRKRTGP |
| 3500 | HKKRKRSKT |
| 3501 | HRKRKRMRC |
| 3502 | HKKRKRQAA |
| 3503 | HKRRARHRT |
| 3504 | TKKRKKSRN |
| 3505 | QKKRKRQRY |
| 3506 | HKKKARQKN |
| 3507 | HKKRKRECS |
| 3508 | TKKRKRQIC |
| 3509 | HDKRKRIKP |
| 3510 | HDRRKKMRP |
| 3511 | TKRRARTKY |
| 3512 | HKKRKKFRP |
| 3513 | HKKRARLRP |
| 3514 | AKKRARMRP |
| 3515 | QRKRARVRN |
| 3516 | HPKRKKTKP |
| 3517 | TKKKKRFKW |
| 3518 | HKKRKKHCP |
| 3519 | HQKKKRKCP |
| 3520 | HKRRKKTRS |
| 3521 | HKKKKKTRT |
| 3522 | HDKRKRLQP |
| 3523 | CKRKKRTCP |
| 3524 | HKKKLQTKN |
| 3525 | KPKKKRVNH |
| 3526 | TKKKKRTRT |
| 3527 | HGKKKRVKP |
| 3528 | TKKKKRTRP |
| 3529 | HKKKKRTRP |
| 3530 | HDKRKKQRE |
| 3531 | HKKKKRLRS |
| 3532 | HKKRAKLRP |
| 3533 | HKKKAKDRP |
| 3534 | KKKKKRLRP |
| 3535 | MKRKKRFRC |
| 3536 | HCKKAKQRP |
| 3537 | TRPRKRTKP |
| 3538 | HDRKGKQRP |
| 3539 | HKRRAKFRT |
| 3540 | HRKRGRLRP |
| 3541 | HKKRKKQQP |
| 3542 | HKKKKRQRS |
| 3543 | HDKKARVKP |
| 3544 | HEKKGRMRP |
| 3545 | KKKRKRHRP |
| 3546 | KKRKKRVRP |
| 3547 | AKKRLRHRP |
| 3548 | HKRKGKFRP |
| 3549 | HDRKAKVRP |
| 3550 | HQRKKKMQW |
| 3551 | HKKRSRQKS |
| 3552 | HKKRGRFRE |
| 3553 | HKKKKKARW |
| 3554 | HCKRARTAH |
| 3555 | HKKRQRMRC |
| 3556 | HKKRARQAP |
| 3557 | HKRRAKVIP |
| 3558 | HCRKDKTRW |
| 3559 | TKKRARLRP |
| 3560 | HRRKKKLAS |
| 3561 | HKKRAKQKY |
| 3562 | AKKRKKQHP |
| 3563 | HPKRKRQKP |
| 3564 | HKRKARVRP |
| 3565 | HKKKKRARP |
| 3566 | HKKKKKMRC |
| 3567 | HKKKAKTRP |
| 3568 | HQKRKKQRP |
| 3569 | HRKKLRCRW |
| 3570 | IKKKKKMRS |
| 3571 | HKKRSRLRP |
| 3572 | HRRKKRVGP |
| 3573 | HKRRDRQRS |
| 3574 | HQKRGRVRT |
| 3575 | HKKRGKMRP |

[0196] In some embodiments, a retina tissue-tropic VP capsid polypeptide comprises a 581 to 589 region having at least 75% sequence identity to any one of SEQ ID NO: 2514-SEQ ID NO: 3575. In some embodiments, a retina tissue-tropic VP capsid polypeptide comprises a 581 to 589 region having at least 77.7% sequence identity to any one of SEQ ID NO: 2514-SEQ ID NO: 3575. In some embodiments, a retina tissue-tropic VP capsid polypeptide comprises a 581 to 589 region having at least 85% sequence identity to any one of SEQ ID NO: 2514-SEQ ID NO: 3575. In some embodiments, a retina tissue-tropic VP capsid polypeptide comprises a 581 to 589 region having at least 88.8% sequence identity to any one of SEQ ID NO: 2514-SEQ ID NO: 3575. In some embodiments, a retina tissue-tropic VP capsid polypeptide comprises a 581 to 589 region having a sequence of any one of SEQ ID NO: 2514-SEQ ID NO: 3575. In some embodiments, a retina tissue-tropic VP capsid polypeptide comprises a 581 to 589 region having one or two amino acid substitutions relative to any one of SEQ ID NO: 2514-SEQ ID NO: 3575. In some embodiments, a retina tissue-tropic VP capsid polypeptide comprises a 581 to 589 region having one or two conservative amino acid substitutions relative to any one of SEQ ID NO: 2514-SEQ ID NO: 3575.

[0197] TABLE 7 provides additional 581 to 589 region sequences predicted to confer retina tissue tropism or preference, generated and selected using machine learning.

TABLE 7
Additional Exemplary 581 to 589
Region Sequences for Retinal Targeting

| SEQ ID | |
|---|---|
| NO | 581 to 589 Region |
| 3576 | KGRRKKVSG |
| 3577 | AQKKVKKFG |
| 3578 | HKKRRKVWH |
| 3579 | KSKIKKYAG |
| 3580 | QNKKKKWSW |
| 3581 | HKKKLKWVS |
| 3582 | KKKKPVTWG |
| 3583 | KVKTKKKWA |
| 3584 | KTKKIKSHG |
| 3585 | KRKKAARKP |
| 3586 | KQKIKKSSG |
| 3587 | KKKKTRHQR |
| 3588 | KVKKKVCGG |
| 3589 | KKRPKRRQC |
| 3590 | MAKRKKWRP |
| 3591 | KTKKKHTSD |
| 3592 | RNKKKKRCW |
| 3593 | CKKKKRKGC |
| 3594 | KMRKKKCEQ |
| 3595 | KKKFVKMTH |
| 3596 | KTKAFKKLG |
| 3597 | KVKRKRKAG |
| 3598 | KVKTCKKPQ |
| 3599 | MKKLKKLWC |
| 3600 | KWKKKKGIF |
| 3601 | FKKKGKAHA |
| 3602 | LKKMKKQAC |
| 3603 | KTRKTKWSP |
| 3604 | KAKWYKKGN |
| 3605 | KRKRRRKKS |
| 3606 | KKKVWIKSQ |
| 3607 | KYKNKKWNS |
| 3608 | NVKRYRHAQ |
| 3609 | RTKKRRSCG |
| 3610 | IPKKKRKWC |
| 3611 | KGKLKKHCT |
| 3612 | HRKKKRQWS |
| 3613 | KPKKAKQQQ |
| 3614 | HKKKMGRGH |
| 3615 | KKKTRKVQE |
| 3616 | NKKHKKRGM |
| 3617 | KKKSKITNH |
| 3618 | LCKKKKRFQ |
| 3619 | KAKRQRWRP |
| 3620 | QYKKKKRVS |
| 3621 | TKKRRRRMT |
| 3622 | KARKLKIQG |
| 3623 | KTHRKKKFM |
| 3624 | TKRKKKIGP |
| 3625 | SKKRNKVCT |
| 3626 | KSKFHKQKA |
| 3627 | KKLKAKVCM |
| 3628 | KLRKKRTRG |
| 3629 | HKKRRKSHH |
| 3630 | RKKKRYKIV |
| 3631 | KKKNKLHVQ |
| 3632 | KSKWVKKWH |
| 3633 | RKRKKARTP |
| 3634 | KKKSKHMQA |
| 3635 | KRKRAKVNC |
| 3636 | NWKKKKVCT |
| 3637 | IKKKKKHND |
| 3638 | KHKMKKHVG |
| 3639 | KKKKMHPCT |
| 3640 | KVKGRKIFK |
| 3641 | KKKKLKSWF |
| 3642 | NRKRRRKKM |
| 3643 | KAKRPKSKA |
| 3644 | KKARKKFVA |
| 3645 | KKRKIPRKG |
| 3646 | GRKKFKIKN |
| 3647 | KVKVKKGYW |
| 3648 | KVRKEKTKH |
| 3649 | MKKKKRLLV |
| 3650 | KHRKSKTRT |
| 3651 | YKKRRKRWA |
| 3652 | KKRGKKFSP |
| 3653 | KLKKRGKGG |
| 3654 | ATKRKKKAL |
| 3655 | KKKKAHATY |
| 3656 | KHKKKHYHN |
| 3657 | HRKRTRYGC |
| 3658 | KMKRKKSNQ |
| 3659 | KRKRQKQYQ |
| 3660 | AHKKKKHLT |
| 3661 | KSRKSKGKG |
| 3662 | QTKRRKKGC |
| 3663 | KGKKFKKGV |
| 3664 | KAKQKWVKF |
| 3665 | RVKRCRRCA |
| 3666 | RAKRPRRQW |
| 3667 | KQKKKQYPQ |
| 3668 | KVKRWRGQQ |
| 3669 | CKRRRKRYI |
| 3670 | KKKYRKRRG |
| 3671 | KRRKKGNAT |
| 3672 | SKKRLKSHG |
| 3673 | KKKRKSHNS |
| 3674 | KKKDQKACV |
| 3675 | LRKKKKQTG |
| 3676 | TRKRKKKVK |
| 3677 | VKKKQKSHE |
| 3678 | KKKKFKNVE |
| 3679 | RAKQKKKQS |
| 3680 | KMRKSKVCP |
| 3681 | ARKRKKSCC |
| 3682 | MKHKKKWCH |
| 3683 | QHKKKKRYA |
| 3684 | KRKMIKKCM |
| 3685 | KKMKKRQTG |
| 3686 | KNKKKKKMC |
| 3687 | KCKRKRRRG |
| 3688 | AKKKRKVIM |
| 3689 | HRRKQRRYQ |
| 3690 | KKRKQKRGM |
| 3691 | KKARKTKSH |
| 3692 | KKRKFNRAA |
| 3693 | KRKKSRSYG |
| 3694 | MKKVKKKTG |
| 3695 | KGRRQKRAA |
| 3696 | KNKKKREAT |
| 3697 | YKKMKRKQV |
| 3698 | KRKKKPNDQ |
| 3699 | NKRKKRGGP |
| 3700 | TARKKKCKM |
| 3701 | STKRKKKGN |
| 3702 | HKKRGRSMH |
| 3703 | KKRKYHCDW |
| 3704 | KCKSKKKIA |
| 3705 | YKRKWKHCE |
| 3706 | TIKKFKRKH |
| 3707 | RAKRKRKNM |
| 3708 | AKKRKKDWS |
| 3709 | KARKARRFF |
| 3710 | KKKKHLSNM |
| 3711 | KKKALKRPM |
| 3712 | KGKRQKKQE |
| 3713 | CHKNFKKKG |
| 3714 | KKKTNKCTN |
| 3715 | RTKKRKCFA |
| 3716 | RIRKRKQRQ |
| 3717 | KKRIMKKSH |
| 3718 | APRKKKEKG |
| 3719 | KTKKFKWRV |
| 3720 | QKRKEKKCC |
| 3721 | LKKRKRVAA |
| 3722 | RVKRKRYWQ |
| 3723 | CKKLWKKHH |
| 3724 | KKKWIRRKD |
| 3725 | KLRKMKKTP |
| 3726 | RKKKKAWAT |
| 3727 | KVKKWGWKT |
| 3728 | IKKKIKIAG |
| 3729 | RVKRARHYS |
| 3730 | KKRRCQRGQ |
| 3731 | KKKKWWQCA |
| 3732 | KAKFTKKYQ |
| 3733 | RRKKAKHCS |
| 3734 | KRKKYKWQL |
| 3735 | TKAKKKAPV |
| 3736 | IRRKKKNGS |
| 3737 | HKKRKRCNN |
| 3738 | QSKRKKRKW |
| 3739 | RHRKKRQYP |
| 3740 | KQRKKKTAN |
| 3741 | KARAKKLKA |
| 3742 | KKRRYRHEY |
| 3743 | KRKRRHHTH |
| 3744 | KKKGYKCMW |
| 3745 | KVKKAKQIF |
| 3746 | KKKVKMHIG |
| 3747 | VYKNKKVKS |
| 3748 | KKHKTKAHH |
| 3749 | MAKKKKWQI |
| 3750 | RKRKIRRNC |
| 3751 | KKKKCRLQW |
| 3752 | KKKRNKAWW |
| 3753 | KKKRKDRAY |
| 3754 | CKKTKKYFT |
| 3755 | MKKKQKNTY |
| 3756 | KKKGKGINS |
| 3757 | CKKGRKKWM |
| 3758 | KKRRYKCAH |
| 3759 | QAKKKKKQG |
| 3760 | KKKRKARMD |
| 3761 | RMKRRRHSS |
| 3762 | TNKPKKCKG |
| 3763 | PKKRKFVKG |
| 3764 | KKRKGTGGW |
| 3765 | NKKVQKKPC |
| 3766 | TGKKKKWQP |
| 3767 | QGKKKKVNG |
| 3768 | KYRKWKRTM |
| 3769 | KRRRARQSS |
| 3770 | KSKKNSYKN |
| 3771 | KSKVTKTKG |
| 3772 | KSRKRRTQW |
| 3773 | KKKQNKWKW |
| 3774 | KNKFTKMKS |
| 3775 | MKKMKKCSG |
| 3776 | KMKRKKGQS |
| 3777 | KKLRKKSCG |
| 3778 | KFKKKHIME |
| 3779 | KVKWNKKCT |
| 3780 | KAKKKVRLC |
| 3781 | KKKHTTSKG |
| 3782 | HKKRRARAH |
| 3783 | NKKRKRGHY |
| 3784 | KKKKRFHFN |
| 3785 | KCKRKHVAS |
| 3786 | HKKKVKSHN |
| 3787 | VVKWKKCKT |
| 3788 | KSKNKKGCN |
| 3789 | KCKKKQNHV |
| 3790 | KGKRKRKHS |
| 3791 | KIRKHKKDN |
| 3792 | NKRKRKYKG |
| 3793 | KVKWKQKVG |
| 3794 | KMKHKKHSA |
| 3795 | AKKAQKQKQ |
| 3796 | KKKAKSYDN |
| 3797 | KSKTFKYGG |
| 3798 | KTKPKKCGG |
| 3799 | KAKRKTFVS |
| 3800 | KVRKKRQHA |
| 3801 | KTRKYKIYQ |
| 3802 | KKKKSMRHR |
| 3803 | QKKKKSCHG |
| 3804 | HKGKKKALG |
| 3805 | KVKMRKKNT |
| 3806 | KRKNKKSFW |
| 3807 | YVKRRKKKN |
| 3808 | KKKCKWGMM |
| 3809 | GKKGNKCKQ |
| 3810 | VKKKIKVST |
| 3811 | KWKRKCKGQ |
| 3812 | KKQKKRTYT |
| 3813 | KTRAKKKTT |
| 3814 | KKKKYHHDT |
| 3815 | WKKRKKAGF |
| 3816 | CCKTKKQKG |
| 3817 | KARRRKRYP |
| 3818 | KKKKTRVIE |
| 3819 | QQKAKKCKG |
| 3820 | KCKKKIRWT |
| 3821 | KKKLKRRAN |
| 3822 | VAKRRRKCC |
| 3823 | KQKKSKYTH |
| 3824 | KKKMRKREH |
| 3825 | KRKKKWKAH |
| 3826 | KRMKKKRAY |
| 3827 | SRKKKKKMS |
| 3828 | KKKQGRFKE |
| 3829 | GIRKKKKTT |
| 3830 | LVKPKKKAQ |
| 3831 | KIKGRKKHC |
| 3832 | KGKCKKTHH |
| 3833 | KLKKRKSVN |
| 3834 | KARKSKRAT |
| 3835 | KPRKKKGSE |
| 3836 | KRKRMRNMH |
| 3837 | HKRKKPPKE |
| 3838 | KKKSKYSGV |
| 3839 | RSRKKRRGM |
| 3840 | KRKRHKHQS |
| 3841 | HKRKGKSKW |
| 3842 | KKRKLKWFW |
| 3843 | KQKVKKENC |
| 3844 | GKKKGKRMN |
| 3845 | KHKKCIKCA |
| 3846 | KTRKRRAYC |
| 3847 | SKKTYKKAY |
| 3848 | TKKKGKQYH |
| 3849 | KIKMKKLQF |
| 3850 | KSRMKKLKT |
| 3851 | KKRRRWRYM |
| 3852 | SKKRVKSSG |
| 3853 | KNKRKKNHD |
| 3854 | MKHKKKQQN |
| 3855 | RTKKRRRQH |
| 3856 | KQKIKKMGF |
| 3857 | QSRKKKRNS |
| 3858 | KGKKRKQMH |
| 3859 | YNKKKKHSG |
| 3860 | KGKAKKRRH |
| 3861 | KKAKGKAYP |
| 3862 | MIKIKKKGT |
| 3863 | KKKKVYRYS |
| 3864 | KKKKTVPAW |
| 3865 | CFKKRKKGV |
| 3866 | KCKRTKKRN |
| 3867 | KVKCKKHSG |
| 3868 | KVKKMKSMW |
| 3869 | KVRRYKRLS |
| 3870 | NKQRKKKQC |
| 3871 | KAKTKRHKD |
| 3872 | KVKRMKMTA |
| 3873 | MKKKKVRYH |
| 3874 | KSKCKKGRA |
| 3875 | TCKWKKAKH |
| 3876 | KVKRVRKYW |
| 3877 | FKKKTKCMG |
| 3878 | KTKKKTTMF |
| 3879 | MRRKKKQVY |
| 3880 | KKKRKRRES |
| 3881 | RKKKKKAGD |
| 3882 | CGRKKKRCD |
| 3883 | KVKKRKMYM |
| 3884 | KKKRKKIGL |
| 3885 | HKKRRRYPY |
| 3886 | KKKKAHCSC |
| 3887 | KVRKTKACI |
| 3888 | SQKKKRVKH |
| 3889 | LMRKKKQVP |
| 3890 | KKKAKSTDC |
| 3891 | CRKKKKAHV |
| 3892 | KKKCRKHQY |
| 3893 | KARKKFKTN |
| 3894 | KGRKKRHPG |
| 3895 | KVKKSKHMM |
| 3896 | KRKQKFAKH |
| 3897 | KNRMKKKHC |
| 3898 | LCKSFKKKF |
| 3899 | KAKKRRQFH |
| 3900 | KLKRRRRHS |
| 3901 | EKKKKRRVC |
| 3902 | KASKKKRYH |
| 3903 | GIKKKKSVM |
| 3904 | TKKRKRVKM |
| 3905 | VCKKKKMKH |
| 3906 | HIKKKKGFG |
| 3907 | KKRQKKMCA |
| 3908 | CKKKMKTGW |
| 3909 | HKRRRFTGY |
| 3910 | KRRKHKKMM |
| 3911 | QCKKQKQKS |
| 3912 | IKRRKKCMH |
| 3913 | KNKAQKKPA |
| 3914 | KWKKMKLFM |
| 3915 | KRRRRARGW |
| 3916 | KVKGRKKYP |
| 3917 | NKKHKKCHS |
| 3918 | KKKRVGQVA |
| 3919 | KAKPKKNHC |
| 3920 | TMKRKKHQC |
| 3921 | KRKGVKKRQ |
| 3922 | KRKKMTKSL |
| 3923 | KKRRQKTVQ |
| 3924 | RVRRRKSTG |
| 3925 | ATKKKRKNM |
| 3926 | KKKFKNWTY |
| 3927 | RTKRYRWRC |
| 3928 | RTKAKKTKS |
| 3929 | KKKMGKKCN |
| 3930 | KAKRFKLYT |
| 3931 | KKKKCWMEQ |
| 3932 | KGKKNKMIY |
| 3933 | KKKRVSWSC |
| 3934 | RHKKKKDAH |
| 3935 | KKKWKASQC |
| 3936 | KSKKFKLSY |
| 3937 | KTRKVKWCM |
| 3938 | RKKKKRRSM |
| 3939 | RFKKKKRFA |
| 3940 | KFKKKCYAW |
| 3941 | KKKKSRTRH |
| 3942 | HKRKKSWHL |
| 3943 | KKKRNRRSA |
| 3944 | RKKRVRNSH |
| 3945 | CKRKKKHTL |
| 3946 | HKRKQRQRC |
| 3947 | AKKKKKHKP |
| 3948 | KWKMKKWMP |
| 3949 | RRKRRHSAT |
| 3950 | RIKRKRWSS |
| 3951 | HKKYCKKTS |
| 3952 | RVRRRKWCE |
| 3953 | KSKRCKFKQ |
| 3954 | KKKKMMCNH |
| 3955 | KVKKVRKYH |
| 3956 | KKKKVFKTH |
| 3957 | KTKKKSYDM |
| 3958 | KTKLKKMFS |
| 3959 | TKKTMKKAN |
| 3960 | ARKKKKKRG |
| 3961 | KWRKAKAKY |
| 3962 | KKRKQKSTH |
| 3963 | KRKRKITSD |
| 3964 | RAKRIRIRC |
| 3965 | KTKTLKTKF |
| 3966 | QARKKKRLG |
| 3967 | KTKKKLMGN |
| 3968 | IKKRRKLHP |
| 3969 | KKKKKFRCS |
| 3970 | KQKFGKKAG |
| 3971 | KKRKIVCGY |
| 3972 | KKRGKKKGH |
| 3973 | KKKGQKGYA |
| 3974 | LRRRKKNRY |
| 3975 | KVKKIKNRD |
| 3976 | KRKRFKNDK |
| 3977 | KRRKTNRQP |
| 3978 | KTKRYRFHN |
| 3979 | KARRKRCQC |
| 3980 | KTKKRRSSN |
| 3981 | QVKKKKRLM |
| 3982 | KVKRKKIGW |
| 3983 | RSRKRKSYV |
| 3984 | KRRKFKRSD |
| 3985 | MKMKKKRGH |
| 3986 | KKKKFIKSL |
| 3987 | KVKRRKRRM |
| 3988 | KVKKGQQKC |
| 3989 | VKKSVKKIC |
| 3990 | KKKAKHGWE |
| 3991 | KTKRKRAYW |
| 3992 | KKFKCKNSW |
| 3993 | RRKRFRFYS |
| 3994 | TRRKGKRCN |
| 3995 | KKKKMYHSS |
| 3996 | KVRKKKDHC |
| 3997 | SKKRYKRGS |
| 3998 | KNKKCKFSN |
| 3999 | HKRKSQHHA |
| 4000 | KVKKKRLSA |
| 4001 | KAKRKRRHN |
| 4002 | RAKKKKRAG |
| 4003 | KRRRQRRHH |
| 4004 | KTKKKAKCV |
| 4005 | KVKKYKAHY |
| 4006 | KLKKKRRYF |
| 4007 | RVKKKRQAE |
| 4008 | KNKKVVKHH |
| 4009 | KFKKMRKAT |
| 4010 | KKKKRSYMP |
| 4011 | KMKSKKCAG |
| 4012 | RKKKKQLGI |
| 4013 | KFRKRKIYS |
| 4014 | KIRKRRQHT |
| 4015 | KRKKKMRPA |
| 4016 | KAKKQKTTE |
| 4017 | SMKKFKKMS |
| 4018 | KKKVLKTVE |
| 4019 | KSKVKKHGW |
| 4020 | KQKKIIKCF |
| 4021 | KRKKNKMGP |
| 4022 | KSKKNKWQQ |
| 4023 | KKKRIQCHV |
| 4024 | KIKTKKKMA |
| 4025 | KRKRCVWRS |
| 4026 | KKRKKNTFS |
| 4027 | PKKKKRWTP |
| 4028 | VKKSKKQTN |
| 4029 | KKKAKHIEC |
| 4030 | KAKKNKGHY |
| 4031 | VKHRKKVKY |
| 4032 | KTKQKKHCC |
| 4033 | KTHKKKGSY |
| 4034 | IKKSKKAFG |
| 4035 | TRKIKKQKG |
| 4036 | KAKKMKMSW |
| 4037 | KKKRSLKIE |
| 4038 | KKKRKKTIY |
| 4039 | KAKHKKQIE |
| 4040 | CRKKKRRMW |
| 4041 | KKRRKGMGF |
| 4042 | KVRKAKVQQ |
| 4043 | CKKKKSVCF |
| 4044 | MAKRKKRRH |
| 4045 | MKHKKKNHV |
| 4046 | KSKKRKMTT |
| 4047 | KCKKNKHHP |
| 4048 | KKKRLRGRG |
| 4049 | IVKKGKHKS |
| 4050 | SKRKKKIVW |
| 4051 | KTKMRKKNA |
| 4052 | KKKYSKNTC |
| 4053 | AKKKKGMKW |
| 4054 | KSKKGKTSP |
| 4055 | MIKKIKKCG |
| 4056 | RFKRKKMKM |
| 4057 | HTRKMKTHF |
| 4058 | KTKKSKVAM |
| 4059 | GRKKRKKSD |
| 4060 | KRKCIKQKF |
| 4061 | KRKKGRKAE |
| 4062 | QQKKKKATW |
| 4063 | KRRKRGYST |
| 4064 | KMKRYRWHY |
| 4065 | CMKRKKKQP |
| 4066 | RKKKKWWST |
| 4067 | KKKKYQVFT |
| 4068 | KIKMYKKFN |
| 4069 | SKKKQKCLV |
| 4070 | RKRKKRRIY |
| 4071 | IKKRYKHLV |
| 4072 | KIKYSKKTG |
| 4073 | NAKRYRQHY |
| 4074 | KRRRIQRSM |
| 4075 | KVKKKGRSD |
| 4076 | RTKRNRKCQ |
| 4077 | KKRSKSKCS |
| 4078 | KCKNAKKVG |
| 4079 | HKRRCRHRY |
| 4080 | RHKKKKEHC |
| 4081 | HKKTKKNSS |
| 4082 | KCKKRKFMP |
| 4083 | KNKRVKKMG |
| 4084 | MKRRKKKWI |
| 4085 | NKKNKKVNN |
| 4086 | AVKRKRRMQ |
| 4087 | KKKRQRGWF |
| 4088 | KSKTKSKVC |
| 4089 | KVKHVKKQS |
| 4090 | NNKKRKKFQ |
| 4091 | IKKMKKARM |
| 4092 | KVKLKKICH |
| 4093 | KFHKKKQSW |
| 4094 | KCKKWKIMM |
| 4095 | KGKSGKTKM |
| 4096 | VRRRKKRWA |
| 4097 | KKKAKNYTY |
| 4098 | HKKRKPTVY |
| 4099 | KVRKRRYCA |
| 4100 | KKKRRRNAW |
| 4101 | KSKSKKMFR |
| 4102 | KKKRKVYGM |
| 4103 | SRRRKKNKH |
| 4104 | RKRKKRYHM |
| 4105 | KPKRKSCKH |
| 4106 | KTKRRKSMC |
| 4107 | AKKKFKYNN |
| 4108 | RRKRIKSSQ |
| 4109 | KKKGRRKNR |
| 4110 | KAKGFKKMD |
| 4111 | RRKKAKHVH |
| 4112 | YKKRKKCGM |
| 4113 | KARRMKRQK |
| 4114 | SAKKKKWDS |
| 4115 | VHKKKKSCW |
| 4116 | QVKVKKKCL |
| 4117 | KAKRFRWRS |
| 4118 | KKKIYKLHN |
| 4119 | KKHMKKSQV |
| 4120 | RRRRKKFTP |
| 4121 | KKKWIKGWG |
| 4122 | QAKKKKVHA |
| 4123 | QKKKMRKFS |
| 4124 | KKRCKKCSS |
| 4125 | KRHRAKKKH |
| 4126 | MAKRYRWWS |
| 4127 | KKKYFKKVY |
| 4128 | KKKKKPRSG |
| 4129 | RQKKRKAGS |
| 4130 | KRKRRIGRT |
| 4131 | KSKKKIRAS |
| 4132 | KRRKMRQVS |
| 4133 | LVKKSKKNG |
| 4134 | RKKKKMGWN |
| 4135 | KAKVHKKRN |
| 4136 | KKRLCKWKV |
| 4137 | KSRKMKFMC |
| 4138 | GGRRKKRYY |
| 4139 | LKKKTGRKP |
| 4140 | KAKRCKRWY |
| 4141 | LYKKRKKCI |
| 4142 | KAKAFKSSQ |
| 4143 | SKRKNKSCT |
| 4144 | KOKKKGDAR |
| 4145 | ILKRKKKSL |
| 4146 | KVKKKQVNG |
| 4147 | HRRRTKRFQ |
| 4148 | KVKKKTVGP |
| 4149 | KALKKKGWG |
| 4150 | SKKRKKQKH |
| 4151 | KVKPKKHLA |
| 4152 | KKKSIKVVP |
| 4153 | KKRRAKNCP |
| 4154 | KTRKGKKHG |
| 4155 | ISRKKKQAG |
| 4156 | KAKKKRNQA |
| 4157 | VKKRKRVWT |
| 4158 | QKKRQRYPS |
| 4159 | KKKGVKNRS |
| 4160 | KRRKIKKGG |
| 4161 | KRKRPRQSC |
| 4162 | RKRKRIGGT |
| 4163 | KKKRSRRSC |
| 4164 | RKKKRCKSS |
| 4165 | KTKKPKQHP |
| 4166 | HKKKKCNWC |
| 4167 | KQRKIKRYP |
| 4168 | KTKKKQRAN |
| 4169 | KSKNKTTKC |
| 4170 | RFKRKKFIS |
| 4171 | KKKMKSRHP |
| 4172 | KCKSKRHHK |
| 4173 | KRKTKKHPQ |
| 4174 | KSRKTKYCK |
| 4175 | RTKRSRSNY |
| 4176 | KRARKKAKC |
| 4177 | AAKRKKKCC |
| 4178 | KKKRYRRYW |
| 4179 | TKKRYKRMY |
| 4180 | KKRRIRNYG |
| 4181 | KRKKNLKAN |
| 4182 | VLKHKKKSC |
| 4183 | KTCKKKWMG |
| 4184 | KRRKLRRGG |
| 4185 | KNKKKHWRP |
| 4186 | KSRKTKTGW |
| 4187 | KKSRKRKQF |
| 4188 | HKKGFKKWY |
| 4189 | KAKRKKWLH |
| 4190 | KKKRFVMRG |
| 4191 | KTKKQRKAV |
| 4192 | KGKKSKQGG |
| 4193 | RKKQQKNKA |
| 4194 | KFRKKHTLP |
| 4195 | RKKRYRWCQ |
| 4196 | HKKKKHFYA |
| 4197 | VKKRNRRTM |
| 4198 | RKKKMKGAG |
| 4199 | KKKSMARKW |
| 4200 | KTKKTKAWG |
| 4201 | KTRRKKHTD |
| 4202 | LKRKKPKCQ |
| 4203 | QVKGKKAKP |
| 4204 | IKKRRRFGP |
| 4205 | NGKHKKKCF |
| 4206 | KMKACKKAG |
| 4207 | KKKRNKIYS |
| 4208 | KKKKGNYLT |
| 4209 | KKKQYKSWV |
| 4210 | KFKKMKRKM |
| 4211 | KQKRSKAYC |
| 4212 | KGKKRGRQM |
| 4213 | KKKKHWFVA |
| 4214 | KARWKKRHG |
| 4215 | RKKRKRRNN |
| 4216 | KKCKKKVPA |
| 4217 | VTKKKKVRT |
| 4218 | SVRKKKKAA |
| 4219 | AKKHMKKVG |
| 4220 | TKKKKRYHN |
| 4221 | KWRKFKCYH |
| 4222 | HKRKRHMNP |
| 4223 | RKKTKKAFT |
| 4224 | IQKKKKCWL |
| 4225 | KYRKYKTSS |
| 4226 | KSKRYKTCC |
| 4227 | VKKKSKVTS |
| 4228 | KSKRKGHNK |
| 4229 | RKKMKRQKE |
| 4230 | KNKRKAKWP |
| 4231 | KRKKRGSWG |
| 4232 | KARRVRRYY |
| 4233 | QKKKVKKCW |
| 4234 | VRKRQRQCT |
| 4235 | RKRKWKCHC |
| 4236 | KVKKKAVVY |
| 4237 | KVKKVKISP |
| 4238 | KKKKHQPVA |
| 4239 | KRRRKTGSQ |
| 4240 | QNKKKKAYI |
| 4241 | AKKKCKKWT |
| 4242 | TKKRRKSPS |
| 4243 | KCKRRKKAG |
| 4244 | KNKRRKKLY |
| 4245 | KVKASKRKC |
| 4246 | KKKRFSQVF |
| 4247 | KGKWKKFIG |
| 4248 | HIRKKKYGN |
| 4249 | KLKWKKMWC |
| 4250 | KRRKNRYWA |
| 4251 | HKKKIKRCD |
| 4252 | KCKKKSTYS |
| 4253 | KKFKVKHIC |
| 4254 | QKKVMKKCG |
| 4255 | HKRKICGHH |
| 4256 | KVKKKRCRK |
| 4257 | KTRKKNHGT |
| 4258 | KKQKKRSQN |
| 4259 | KKARRKRYH |
| 4260 | KSKKHKHDH |
| 4261 | KSKDKKQWQ |
| 4262 | AKKRKRVAW |
| 4263 | SPKKKKWRT |
| 4264 | KFKKTKWKF |
| 4265 | KRKVKKLMF |
| 4266 | KFRKVKTAT |
| 4267 | YKKMKKCAY |
| 4268 | RKKKDRRKC |
| 4269 | HKRRRKTPP |
| 4270 | KAKKKNFVI |
| 4271 | GKKHTKGKQ |
| 4272 | KMKSKKMQQ |
| 4273 | RAKRYKKTA |
| 4274 | NCKRKKGNK |
| 4275 | KKKHMKIGN |
| 4276 | KYKFKKWST |
| 4277 | KSKRYRMMV |
| 4278 | KKKKAKMDG |
| 4279 | TNKKKKKAV |
| 4280 | KLKKFKRDW |
| 4281 | KQKRRRRCM |
| 4282 | KKKWLKNIY |
| 4283 | KVKMKKIWA |
| 4284 | KKKSSKSFC |
| 4285 | KKRKHINKA |
| 4286 | KRKRKRRCH |
| 4287 | YKKKMKWML |
| 4288 | AKKGKKQMT |
| 4289 | CKKFQKKFA |
| 4290 | NKRRIKHRQ |
| 4291 | IKKRRKTQN |
| 4292 | RKKQKKRTS |
| 4293 | RSKRRKACG |
| 4294 | YGRKKKQCK |
| 4295 | RTKKKKVCS |
| 4296 | KAKTKGYKN |
| 4297 | KSKKKRNQQ |
| 4298 | KLKRTRRSW |
| 4299 | RTRKVKHKC |
| 4300 | KVKRYRNHW |
| 4301 | QRRRNKRQQ |
| 4302 | KKRRYHSWA |
| 4303 | KKKSKKNSA |
| 4304 | KVKWKKDQG |
| 4305 | VKKGMKKQY |
| 4306 | KVRRKRRPS |
| 4307 | YVRKKKFGG |
| 4308 | KVKKKRIQF |
| 4309 | MKGKKKCAG |
| 4310 | KKKWVKTFW |
| 4311 | NKKHRKKGH |
| 4312 | KKKRHQVVK |
| 4313 | MWKRKKVKC |
| 4314 | KGRRKRSAM |
| 4315 | KCRKKQAKN |
| 4316 | KKRKHARVH |
| 4317 | KLKVKKVGS |
| 4318 | KCKRQKRCA |
| 4319 | HIKFKKKQC |
| 4320 | AKKNKKWFT |
| 4321 | KQKIVKKWM |
| 4322 | KTKRIRHHQ |
| 4323 | KIRKKRRRL |
| 4324 | GFKKKKKQQ |
| 4325 | RKKRGKCYG |
| 4326 | KVKKRKTNG |
| 4327 | KKKRRSNLS |
| 4328 | KRKSGKNKS |
| 4329 | KKRKTHATK |
| 4330 | KCKKRGRTK |
| 4331 | QKKCKKRAI |
| 4332 | QKKFRKKQQ |
| 4333 | KQKRIKKLG |
| 4334 | KKKLKGWHV |
| 4335 | KKKKMYFSY |
| 4336 | KTKKVKYWN |
| 4337 | RKKFLKRKG |
| 4338 | IKKRKKTQW |
| 4339 | KFKPKKAYA |
| 4340 | KKRKRSAKS |
| 4341 | LAKPKKKAN |
| 4342 | KVKRKSNKT |
| 4343 | KKKCKLAMF |
| 4344 | KKKANKHMD |
| 4345 | KTRKRRLYA |
| 4346 | RKRRHKGRP |
| 4347 | RKKKKQASY |
| 4348 | KKKKTRHKS |
| 4349 | HKKIKKYVS |
| 4350 | KKKLGKCRW |
| 4351 | QKRKIRRMA |
| 4352 | RHKKKRHCQ |
| 4353 | KKKKGKGIA |
| 4354 | KKKKYWMIH |
| 4355 | KKKRPKATT |
| 4356 | KGKKKSVYP |
| 4357 | KSKKKRRFD |
| 4358 | MIKKVKTKG |
| 4359 | KSKKKAQMH |
| 4360 | CKKYKKYNY |
| 4361 | KKRRTRHSF |
| 4362 | KHKAMKFKN |
| 4363 | HKRKKKLGV |
| 4364 | KVRRKKNAP |
| 4365 | KKKITKRGA |
| 4366 | MKKKKKVCC |
| 4367 | KVRKRKKCA |
| 4368 | KFKRKNCKQ |
| 4369 | SVKKKKNVS |
| 4370 | GPKKKKWSS |
| 4371 | RKKRHGKGC |
| 4372 | KVKMCKQKW |
| 4373 | HKRKGHWVQ |
| 4374 | KFKKKINFW |
| 4375 | RKKRGRKES |
| 4376 | TKKRKPKGS |
| 4377 | HKKRNRFCT |
| 4378 | KRKCKAKGN |
| 4379 | KTRKSKKDR |
| 4380 | KIKRKRKHM |
| 4381 | TKRRHKRQV |
| 4382 | KKKTCKLGH |
| 4383 | KKKKAQRHT |
| 4384 | KKKCKRKYA |
| 4385 | HKKNIKKHW |
| 4386 | EKKRKKWYS |
| 4387 | KKKHCKLHW |
| 4388 | KLKSKKRGR |
| 4389 | STKRRRRAS |
| 4390 | KRKKSMMKT |
| 4391 | AKKKIKKVG |
| 4392 | KRKRWKKLF |
| 4393 | KVKKSKAHM |
| 4394 | KKRRWRHHH |
| 4395 | RSRKVKRHY |
| 4396 | KKKKTLHTN |
| 4397 | CKKKRKQHC |
| 4398 | TKKTKKQQP |
| 4399 | KKKRLKHSD |
| 4400 | MARKKKSRT |
| 4401 | NKKPRKVKW |
| 4402 | VKKRKRNHV |
| 4403 | KVKKMKWKR |
| 4404 | KKRKNKEFI |
| 4405 | KKKGKRHRG |
| 4406 | LAKHKKHKH |
| 4407 | KQKKMKRQD |
| 4408 | KAKWKKWSW |
| 4409 | LKRKKRKDC |
| 4410 | KKRKWHYYG |
| 4411 | KAKKKHSRV |
| 4412 | KQKKKRRTT |
| 4413 | KKKCKNSGT |
| 4414 | QKRKRKLSE |
| 4415 | CKKLKKTGY |
| 4416 | RKKKPKMQM |
| 4417 | RRRRSKSKA |
| 4418 | HKKSWKKYP |
| 4419 | KKKWKVVNW |
| 4420 | KKKVQKMHP |
| 4421 | KKRKKGSWA |
| 4422 | KIRRYKRQA |
| 4423 | KKFKKKSAN |
| 4424 | SKRKKRKWG |
| 4425 | MSRKKKRST |
| 4426 | KKRRHGRWY |
| 4427 | KKKKSSTGP |
| 4428 | KVRKTKIGE |
| 4429 | KKRRTCRHQ |
| 4430 | KKRKGIRGT |
| 4431 | HKRKKHNQM |
| 4432 | RKKRHKGNQ |
| 4433 | LCKKKKRTC |
| 4434 | LKKPKKTCN |
| 4435 | KIKHKKWLV |
| 4436 | KKKKKIQMQ |
| 4437 | KVKRKQQLC |
| 4438 | RCRKRKSIC |
| 4439 | SKKRRRRMS |
| 4440 | ICKKKRLKG |
| 4441 | KLRKFKGKY |
| 4442 | KLKRKKNVQ |
| 4443 | RMKKKRQIM |
| 4444 | KKRRQKVKH |
| 4445 | KKKSKKMFE |
| 4446 | HRKRVRVRF |
| 4447 | KMKKKRCPA |
| 4448 | SARKKKWCC |
| 4449 | HKKRKQTGT |
| 4450 | KKKACKKSA |
| 4451 | KIKKTRKNH |
| 4452 | VKKKLKTGA |
| 4453 | KFKARKHKT |
| 4454 | KHKSHKKQL |
| 4455 | RKNKKKHNA |
| 4456 | CRKKKKIKC |
| 4457 | HHKRQRAHH |
| 4458 | CVRKKKQVG |
| 4459 | SFKWKKKQY |
| 4460 | HGKQKKKCC |
| 4461 | KARRMKNWS |
| 4462 | KKKRFGRQK |
| 4463 | KNKKMKKAA |
| 4464 | KTKVKKVAH |
| 4465 | KKKNYKSSY |
| 4466 | QKKGRKKNL |
| 4467 | TRRKKRRPC |
| 4468 | KGKVSKKQS |
| 4469 | RNRKKKWCC |
| 4470 | KKKKRKNHR |
| 4471 | LHKKKKGNW |
| 4472 | HTKKKKFAP |
| 4473 | NKKKFKTVQ |
| 4474 | KFRKKRWVP |
| 4475 | KKKKQNHGC |
| 4476 | VNKKKKHAA |
| 4477 | SMKKKRKAS |
| 4478 | SKKKQKARP |
| 4479 | TGKKKKHYW |
| 4480 | YCKKWKIKN |
| 4481 | TKRKKKQFH |
| 4482 | KKQKKHRMP |
| 4483 | KTRNKKPKC |
| 4484 | HAKGKKKCM |
| 4485 | KKKKCPHAQ |
| 4486 | KKKRVKDKQ |
| 4487 | KKKTQRHHN |
| 4488 | KKKWWKKSQ |
| 4489 | KVKRKGHCQ |
| 4490 | KVKRSKHCQ |
| 4491 | KIRKKKDMQ |
| 4492 | KKKIRKNFY |
| 4493 | SKRKYKKTG |
| 4494 | KKKPKHVCA |
| 4495 | KRRKHIRRH |
| 4496 | CRKKTKQKV |
| 4497 | RARKKKCFF |
| 4498 | IKKCKKRVM |
| 4499 | HKKRNRKSK |
| 4500 | KKRFKKAFG |
| 4501 | CIKKKKYMN |
| 4502 | KRKKQYKVC |
| 4503 | KMKTYKIKQ |
| 4504 | KHQKKKRSG |
| 4505 | YKKMKKAMI |
| 4506 | KAKKKKKKF |
| 4507 | HVKKKKWNG |
| 4508 | KKRCKKHGS |
| 4509 | YKKKTKYSS |
| 4510 | KKRRYRHAG |

[0198] In some embodiments, a retina tissue-tropic VP capsid polypeptide comprises a 581 to 589 region having at least 75% sequence identity to any one of SEQ ID NO: 3576-SEQ ID NO: 4510. In some embodiments, a retina tissue-tropic VP capsid polypeptide comprises a 581 to 589 region having at least 77.7% sequence identity to any one of SEQ ID NO: 3576-SEQ ID NO: 4510. In some embodiments, a retina tissue-tropic VP capsid polypeptide comprises a 581 to 589 region having at least 85% sequence identity to any one of SEQ ID NO: 3576-SEQ ID NO: 4510. In some embodiments, a retina tissue-tropic VP capsid polypeptide comprises a 581 to 589 region having at least 88.8% sequence identity to any one of SEQ ID NO: 3576-SEQ ID NO: 4510. In some embodiments, a retina tissue-tropic VP capsid polypeptide comprises a 581 to 589 region having a sequence of any one of SEQ ID NO: 3576-SEQ ID NO: 4510. In some embodiments, a retina tissue-tropic VP capsid polypeptide comprises a 581 to 589 region having one or two amino acid substitutions relative to any one of SEQ ID NO: 3576-SEQ ID NO: 4510. In some embodiments, a retina tissue-tropic VP capsid polypeptide comprises a 581 to 589 region having one or two conservative amino acid substitutions relative to any one of SEQ ID NO: 3576-SEQ ID NO: 4510.

[0199] TABLE 8 provides additional 581 to 589 region sequences predicted to confer retina tissue tropism or preference, generated and selected using machine learning.

TABLE 8
Additional Exemplary 581 to 589 Region
Sequences for Retinal Targeting

| SEQ ID NO | 581 to 589 Region |
|---|---|
| 4511 | KHKKKGGPQ |
| 4512 | RKQKKKAWC |
| 4513 | KKRKRAPKI |

[0200] In some embodiments, a retina tissue-tropic VP capsid polypeptide comprises a 581 to 589 region having at least 75% sequence identity to any one of SEQ ID NO: 4511-SEQ ID NO: 4513. In some embodiments, a retina tissue-tropic VP capsid polypeptide comprises a 581 to 589 region having at least 77.7% sequence identity to any one of SEQ ID NO: 4511-SEQ ID NO: 4513. In some embodiments, a retina tissue-tropic VP capsid polypeptide comprises a 581 to 589 region having at least 85% sequence identity to any one of SEQ ID NO: 4511-SEQ ID NO: 4513. In some embodiments, a retina tissue-tropic VP capsid polypeptide comprises a 581 to 589 region having at least 88.8% sequence identity to any one of SEQ ID NO: 4511-SEQ ID NO: 4513. In some embodiments, a retina tissue-tropic VP capsid polypeptide comprises a 581 to 589 region having a sequence of any one of SEQ ID NO: 4511-SEQ ID NO: 4513. In some embodiments, a retina tissue-tropic VP capsid polypeptide comprises a 581 to 589 region having one or two amino acid substitutions relative to any one of SEQ ID NO: 4511-SEQ ID NO: 4513. In some embodiments, a retina tissue-tropic VP capsid polypeptide comprises a 581 to 589 region having one or two conservative amino acid substitutions relative to any one of SEQ ID NO: 4511-SEQ ID NO: 4513.

[0201] Features for Retina Tissue-Tropic AAV VP Capsid Polypeptides. The present disclosure provides features of 581 to 589 region sequences that enhance retina tissue tropism or preference, as determined from a primary screen. In some embodiments, a 581 to 589 region with retina tissue tropism or preference contains one or more basic amino acid residues (e.g., K, R, or H). In some embodiments, a 581 to 589 region with retina tissue tropism or preference contains two or more basic amino acid residues (e.g., K, R, or H). In some embodiments, a 581 to 589 region with retina tissue tropism or preference contains three or more basic amino acid residues (e.g., K, R, or H). In some embodiments, a 581 to 589 region with retina tissue tropism or preference contains four or more basic amino acid residues (e.g., K, R, or H). In some embodiments, a 581 to 589 region with retina tissue tropism or preference contains one basic amino acid residue (e.g., K, R, or H). In some embodiments, a 581 to 589 region with retina tissue tropism or preference contains two basic amino acid residues (e.g., K, R, or H). In some embodiments, a 581 to 589 region with retina tissue tropism or preference contains three basic amino acid residues (e.g., K, R, or H). In some embodiments, a 581 to 589 region with retina tissue tropism or preference contains four basic amino acid residues (e.g., K, R, or H). In some embodiments, a 581 to 589 region with retina tissue tropism or preference contains five basic amino acid residues (e.g., K, R, or H). In some embodiments, a 581 to 589 region with retina tissue tropism or preference contains six basic amino acid residues (e.g., K, R, or H). In some embodiments, a 581 to 589 region with retina tissue tropism or preference contains seven basic amino acid residues (e.g., K, R, or H). In some embodiments, a 581 to 589 region with retina tissue tropism or preference contains eight basic amino acid residues (e.g., K, R, or H). In some embodiments, a 581 to 589 region with retina tissue tropism or preference contains nine basic amino acid residues (e.g., K, R, or H).

[0202] In some embodiments, a 581 to 589 region with retina tissue tropism or preference contains no more than three acidic amino acid residues (e.g., D or E). In some embodiments, a 581 to 589 region with retina tissue tropism or preference contains no more than two acidic amino acid residues (e.g., D or E). In some embodiments, a 581 to 589 region with retina tissue tropism or preference contains no more than one acidic amino acid residues (e.g., D or E). In some embodiments, a 581 to 589 region with retina tissue tropism or preference contains no acidic amino acid residues (e.g., D or E). In some embodiments, a 581 to 589 region with retina tissue tropism or preference contains one acidic amino acid residue (e.g., D or E). In some embodiments, a 581 to 589 region with retina tissue tropism or preference contains two acidic amino acid residues (e.g., D or E). In some embodiments, a 581 to 589 region with retina tissue tropism or preference contains three acidic amino acid residues (e.g., D or E).

[0203] In some embodiments, a 581 to 589 region with retina tissue tropism or preference contains more basic amino acid residues (e.g., K, R, or H) than acidic amino acid residues (e.g., D or E). In some embodiments, a 581 to 589 region with retina tissue tropism or preference contains one or more basic amino acid residues (e.g., K, R, or H) and no acidic amino acid residues (e.g., D or E). In some embodiments, a 581 to 589 region with retina tissue tropism or preference contains two or more basic amino acid residues (e.g., K, R, or H) and no more than one acidic amino acid residue (e.g., D or E). In some embodiments, a 581 to 589 region with retina tissue tropism or preference contains two or more basic amino acid residues (e.g., K, R, or H) and no acidic amino acid residues (e.g., D or E). In some embodiments, a 581 to 589 region with retina tissue tropism or preference contains three or more basic amino acid residues (e.g., K, R, or H) and no more than two acidic amino acid residues (e.g., D or E).

[0204] In some embodiments, a 581 to 589 region having a sequence of SEQ ID NO: 5014 (X¹X²X³X⁴X⁵X⁶X⁷X⁸X⁹, wherein X¹, X², X³, X⁴, X⁵, X⁶, X⁷, X⁸, and X⁹ are each independently any amino acid) comprises K, R, or H at position X³. In some embodiments, a 581 to 589 region having a sequence of SEQ ID NO: 5014 comprises K or R at position X³. In some embodiments, a 581 to 589 region having a sequence of SEQ ID NO: 5014 comprises K at position X³. In some embodiments, a 581 to 589 region having a sequence of SEQ ID NO: 5014 comprises R at position X³. In some embodiments, a 581 to 589 region having a sequence of SEQ ID NO: 5014 comprises K, R, or H at position X⁶. In some embodiments, a 581 to 589 region having a sequence of SEQ ID NO: 5014 comprises K or R at position X⁶. In some embodiments, a 581 to 589 region having a sequence of SEQ ID NO: 5014 comprises K at position X⁶. In some embodiments, a 581 to 589 region having a sequence of SEQ ID NO: 5014 comprises R at position X⁶. In some embodiments, a 581 to 589 region having a sequence of SEQ ID NO: 5014 comprises K, R, or H at position X¹. In some embodiments, a 581 to 589 region having a sequence of SEQ ID NO: 5014 comprises K or R at position X¹. In some embodiments, a 581 to 589 region having a sequence of SEQ ID NO: 5014 comprises K at position X¹. In some embodiments, a 581 to 589 region having a sequence of SEQ ID NO: 5014 comprises R at position X¹. In some embodiments, a 581 to 589 region having a sequence of SEQ ID NO: 5014 comprises K, R, or H at position X⁴. In some embodiments, a 581 to 589 region having a sequence of SEQ ID NO: 5014 comprises K or R at position X⁴. In some embodiments, a 581 to 589 region having a sequence of SEQ ID NO: 5014 comprises K at position X⁴. In some embodiments, a 581 to 589 region having a sequence of SEQ ID NO: 5014 comprises R at position X⁴.

[0205] A VP capsid polypeptide may have a 581 to 589 region having a sequence of SEQ ID NO: 5014, wherein X¹ of SEQ ID NO: 5014 is K or R. In some embodiments, the 581 to 589 region has a sequence of any one of SEQ ID NOs: 1726, 374, 1442, 933, 1748, 4142, 1434, 1358, 1191, 3732, 4110, 4039, 4411, 4506, 4270, 4156, 3780, 4036, 4030, 4016, 1550, 3899, 1247, 1855, 1181, 3919, 1639, 3664, 1244, 4140, 3930, 4117, 4189, 4001, 3799, 3643, 3619, 1240, 1686, 1479, 1307, 1575, 4296, 1665, 3871, 4135, 1605, 4408, 3604, 1274, 4149, 1313, 3741, 1938, 3709, 1727, 3893, 1280, 3622, 1784, 3834, 1752, 1983, 1743, 3979, 4461, 4113, 3817, 4232, 1340, 1489, 4214, 3902, 1857, 2510, 2316, 1904, 1219, 1486, 1512, 1481, 1516, 3820, 3789, 4252, 4047, 4330, 4082, 4094, 1574, 1248, 4078, 1872, 1426, 3785, 3687, 4318, 4243, 3866, 3704, 4172, 1621, 4315, 1192, 1513, 1856, 2476, 3324, 2769, 2678, 1561, 3296, 375, 2343, 2348, 376, 377, 1395, 1584, 4093, 4453, 3940, 3778, 4374, 4210, 4009, 4264, 4339, 4368, 1738, 378, 1610, 4194, 4474, 4013, 4266, 1771, 1759, 1922, 3860, 3832, 1349, 1381, 3663, 1642, 1185, 4356, 3932, 1233, 4212, 3858, 1198, 4192, 3611, 1919, 1819, 3790, 3712, 1969, 4095, 1887, 4468, 1720, 4247, 934, 1790, 2002, 1657, 1663, 1336, 3894, 1554, 1494, 1405, 3576, 4314, 3695, 1851, 1850, 4362, 1815, 3845, 4511, 3656, 3638, 1406, 1596, 4454, 1443, 1661, 935, 4504, 1359, 1734, 3650, 1910, 1305, 1648, 3831, 4435, 1208, 1988, 4451, 1993, 1986, 3849, 1718, 4068, 1835, 1425, 1428, 1282, 4380, 1658, 1452, 1687, 4024, 379, 4072, 3791, 4491, 4323, 4014, 1304, 1440, 1511, 1981, 1676, 1547, 4422, 1283, 3861, 1383, 3644, 3691, 4259, 1749, 1418, 1176, 4216, 1924, 1421, 1387, 3992, 4423, 4253, 1618, 1871, 1256, 3748, 4119, 1297, 1586, 1251, 1299, 1954, 4450, 3990, 4029, 4097, 3890, 3796, 1389, 3711, 4344, 1578, 1476, 4343, 1202, 4413, 4384, 3808, 1647, 1475, 3892, 3674, 1739, 3926, 3595, 1943, 3756, 4405, 3973, 4109, 4159, 3744, 4387, 1960, 4275, 3781, 1535, 1210, 4492, 4365, 4118, 3655, 3886, 4278, 4383, 4485, 1392, 3751, 3931, 3986, 3678, 1249, 4353, 4208, 3710, 4238, 4213, 3969, 4436, 3175, 4128, 2970, 1228, 3534, 3437, 3406, 3641, 3639, 3954, 4335, 3995, 3582, 4475, 3784, 4470, 4010, 3802, 3941, 4427, 4396, 4348, 3587, 3818, 3864, 3956, 3863, 3731, 3814, 4067, 4354, 4350, 4334, 3821, 1932, 3929, 4171, 1258, 3824, 3631, 4465, 4494, 1320, 1398, 3828, 1204, 1223, 1284, 1685, 3773, 4209, 3014, 4462, 4246, 4190, 4312, 4023, 3760, 3753, 1178, 3884, 2783, 4038, 3545, 2916, 3112, 2834, 3880, 3673, 4102, 4399, 4048, 3752, 4207, 1235, 3943, 4355, 4087, 4100, 4327, 4037, 4163, 3918, 4486, 1243, 3933, 4178, 1662, 1643, 4152, 3634, 3617, 4445, 4303, 1370, 3838, 4199, 4284, 1213, 4382, 1399, 1187, 3714, 1828, 4487, 3615, 1842, 1501, 3746, 4018, 4420, 3606, 4121, 3724, 3935, 1941, 4419, 4282, 1955, 1949, 4310, 4488, 1577, 4127, 1288, 1171, 3670, 4052, 3627, 3777, 936, 1371, 3685, 1325, 1940, 380, 4482, 4258, 3812, 1581, 1860, 4124, 4508, 4500, 3652, 3972, 1309, 1630, 1528, 3717, 1217, 3692, 4430, 3764, 4316, 4285, 3645, 3971, 4421, 1172, 4026, 2740, 3125, 3546, 1725, 1206, 3842, 4404, 3690, 3962, 4513, 4340, 4329, 4410, 3703, 4136, 1763, 1487, 3589, 3907, 4153, 2707, 3730, 4426, 4180, 4041, 3923, 4444, 3851, 4429, 4361, 1441, 4394, 4302, 3758, 4510, 3742, 1868, 4077, 1710, 1939, 1335, 1666, 1407, 4187, 1193, 1188, 1196, 1724, 1717, 1200, 1646, 1997, 1975, 1701, 4280, 1613, 4006, 1984, 1351, 3653, 3833, 1593, 2561, 4442, 3900, 4298, 1761, 4388, 1820, 1597, 4317, 4249, 1341, 1203, 1680, 4441, 3628, 3725, 1945, 937, 4206, 1588, 1439, 3794, 4447, 1838, 3776, 3658, 4064, 1377, 4011, 4272, 4503, 1324, 1367, 3594, 3680, 1300, 1750, 938, 3913, 3774, 1877, 1987, 1862, 3998, 1380, 4185, 3686, 3696, 4463, 1350, 4008, 4230, 3853, 4244, 4083, 381, 1909, 3897, 1546, 382, 3613, 3273, 3452, 3525, 1229, 4105, 3835, 383, 1263, 1234, 3970, 1492, 3856, 3586, 1175, 4321, 4020, 4144, 1224, 1199, 3667, 2778, 4412, 4407, 1812, 1810, 3823, 1416, 1427, 1507, 1878, 4333, 3146, 4281, 4211, 1179, 3843, 1669, 1677, 1524, 1525, 1974, 384, 1979, 1456, 1239, 4167, 3740, 1876, 1388, 1967, 1474, 385, 1342, 1471, 4176, 1232, 1989, 4125, 1741, 1508, 1580, 4060, 4378, 1576, 1212, 1893, 3921, 3585, 1174, 1396, 4061, 4015, 1207, 3698, 3825, 3922, 4021, 4181, 1598, 1916, 1429, 4502, 4231, 1321, 4390, 3693, 3734, 1382, 3684, 1747, 3806, 3896, 3635, 1768, 4025, 3976, 3840, 3963, 4286, 1502, 3836, 4161, 3659, 3743, 4130, 3605, 1385, 1783, 4392, 4328, 1316, 4173, 4265, 1246, 1985, 1629, 1829, 1737, 3826, 1473, 1992, 1883, 1656, 1837, 1914, 1839, 1834, 3984, 4495, 3910, 4160, 3671, 4184, 4132, 4250, 1503, 1237, 1523, 1417, 4063, 1562, 3977, 1971, 1707, 1847, 1792, 3769, 4074, 1534, 4239, 4003, 3915, 1689, 1776, 1599, 1265, 1410, 1823, 1498, 1329, 939, 386, 940, 387, 1655, 3874, 4261, 3626, 1791, 3579, 1644, 3936, 4054, 4260, 4359, 4131, 4297, 4357, 4022, 3770, 4046, 1222, 1996, 3788, 4169, 1925, 3953, 4228, 4226, 4277, 4101, 1889, 1369, 3797, 4088, 4019, 3771, 3632, 1402, 388, 1520, 1767, 1466, 1194, 4137, 1908, 1927, 1758, 3772, 3661, 4186, 4174, 1170, 3850, 1315, 1611, 1530, 1859, 2209, 4183, 1408, 1403, 941, 4033, 3623, 3596, 1461, 1848, 1173, 1928, 1459, 1765, 1826, 3719, 1931, 3584, 4004, 3591, 3967, 4168, 3957, 3878, 4165, 4191, 3980, 4058, 4200, 4336, 3958, 1260, 4051, 3798, 4032, 1774, 4322, 3991, 4106, 1641, 1570, 3978, 3965, 4464, 3813, 4154, 1365, 4257, 3846, 4345, 4379, 3603, 1693, 3937, 3801, 1787, 1214, 4483, 4201, 1898, 1845, 1226, 1220, 4245, 1347, 3867, 1900, 3640, 3916, 4089, 1209, 3745, 3988, 3975, 4236, 4075, 4146, 4256, 4308, 4000, 4148, 3588, 3868, 4403, 3883, 4326, 4393, 3895, 4237, 3955, 3727, 4005, 4092, 4372, 4283, 1553, 3805, 4151, 1281, 1681, 4489, 3982, 4437, 3597, 4342, 3872, 3987, 4490, 3876, 3668, 4300, 1679, 1242, 3598, 3583, 3647, 389, 4304, 3793, 3779, 1937, 1907, 4042, 3648, 3996, 3800, 4367, 4099, 1807, 3887, 4428, 1625, 1390, 1884, 1682, 4364, 4306, 3869, 1278, 1672, 942, 1505, 1542, 1709, 1915, 3600, 3914, 1968, 3948, 1670, 3811, 1865, 1362, 943, 1716, 3961, 1506, 4221, 1376, 944, 1683, 4276, 1445, 1721, 1632, 3607, 1328, 1455, 1913, 1497, 1317, 1951, 1778, 1379, 3768, 4225, 1668, 1514, 4002, 3679, 3964, 3707, 3666, 1348, 4273, 1804, 4497, 571, 1401, 4438, 1895, 1264, 572, 1912, 573, 3939, 4170, 4056, 1271, 1065, 1521, 1221, 1066, 1451, 1654, 1067, 3934, 4080, 4352, 574, 1700, 3739, 1565, 1419, 1811, 3950, 1690, 1397, 3716, 1569, 1465, 1437, 1674, 4337, 1285, 4268, 1183, 3726, 3881, 4134, 4347, 4012, 3938, 4066, 4198, 4416, 4164, 3630, 4229, 4292, 4193, 4325, 4375, 4371, 4432, 4215, 1753, 3944, 1409, 4195, 1729, 4223, 1540, 4455, 1068, 1069, 4512, 1723, 1070, 3750, 3633, 4070, 4104, 4162, 4235, 1863, 4346, 1881, 1071, 1814, 1572, 2418, 575, 4443, 3761, 1346, 1587, 1072, 3592, 576, 1891, 4469, 2430, 1275, 577, 1950, 1963, 4129, 1073, 1296, 1360, 1551, 3733, 4111, 3993, 4108, 3949, 1287, 1713, 1556, 1736, 1995, 1435, 1424, 1830, 1705, 1861, 1197, 1254, 4120, 1545, 4417, 1469, 1292, 2185, 2279, 1785, 1236, 4293, 1827, 3839, 3983, 4395, 1957, 2222, 578, 3928, 4295, 3715, 3855, 3609, 1990, 4076, 4175, 3927, 1757, 1650, 4299, 1773, 2004, 1267, 1364, 579, 1462, 1879, 4007, 3729, 3665, 3722, 1691, 1712, 1074, 1624, 1751, 1394, 3924, 3952, 580, 581, 2003, 1343, 2203, 1559, 1250, or 1555.

[0206] A VP capsid polypeptide may have a 581 to 589 region having a sequence of SEQ ID NO: 5014, wherein X² of SEQ ID NO: 5014 is K or R. In some embodiments, the 581 to 589 region has a sequence of any one of SEQ ID NOs: 752, 2144, 1653, 1205, 3795, 753, 4288, 4219, 2770, 2962, 4241, 4107, 2718, 3317, 4391, 4053, 3263, 2553, 3947, 2710, 2608, 3467, 2796, 2961, 2529, 3320, 2674, 2635, 3446, 3053, 3250, 3688, 1182, 1998, 4320, 3351, 2655, 3514, 2779, 3194, 3319, 3224, 3281, 3708, 2807, 3562, 3274, 3374, 3013, 3416, 2981, 3065, 2777, 3469, 2977, 2638, 2972, 3059, 2574, 3380, 4262, 3167, 3368, 2781, 3547, 3386, 1225, 2960, 3485, 3370, 3443, 2824, 754, 1467, 3327, 3178, 3006, 3252, 2991, 3470, 2888, 2572, 3418, 2642, 2519, 3363, 1308, 1230, 3960, 1378, 2994, 3080, 2589, 3681, 51, 1413, 775, 776, 78, 1560, 4289, 3757, 79, 3593, 4043, 1806, 3908, 4397, 1615, 4415, 3723, 2006, 3754, 1470, 4360, 80, 3945, 2854, 3523, 3669, 1356, 777, 778, 87, 3891, 4456, 4040, 4496, 1982, 2001, 1478, 1189, 120, 4791, 2158, 121, 803, 804, 1463, 805, 122, 2139, 2290, 1760, 2465, 123, 130, 131, 132, 4933, 808, 2336, 2026, 2204, 809, 810, 2166, 208, 209, 210, 835, 836, 1334, 837, 3901, 3312, 2649, 1301, 211, 212, 1450, 4386, 3028, 213, 1446, 214, 2206, 215, 1896, 1522, 3490, 838, 216, 234, 4962, 2269, 843, 235, 844, 236, 237, 4930, 845, 846, 238, 847, 1295, 3601, 3877, 1930, 1420, 1678, 1460, 285, 1626, 299, 3809, 4271, 3844, 1436, 300, 1515, 1617, 3646, 4059, 1431, 1331, 310, 3804, 1363, 1934, 1602, 1404, 4188, 1330, 4349, 3337, 3533, 2629, 3038, 2539, 3567, 3291, 3348, 3115, 3359, 2993, 3079, 3506, 2527, 2963, 2938, 2516, 3113, 1345, 2639, 3143, 3044, 2747, 3154, 3280, 3039, 2743, 2902, 3056, 2554, 2522, 3103, 3210, 3434, 2656, 4251, 4166, 4196, 3206, 3328, 2588, 3553, 2714, 3078, 3222, 3137, 3357, 2717, 2944, 3012, 3220, 3202, 2811, 3083, 3269, 3566, 2699, 2515, 3023, 2533, 3288, 3075, 3005, 2685, 3058, 2976, 2622, 3333, 3463, 2939, 3521, 3268, 3117, 2626, 2616, 3240, 2570, 3565, 2919, 3157, 2849, 3444, 2631, 3420, 2659, 3325, 3186, 2920, 3258, 3440, 3457, 3310, 2761, 3134, 2621, 3531, 2711, 2774, 2867, 2585, 3155, 2620, 3156, 2844, 3126, 3160, 2909, 3542, 3225, 2887, 3474, 3218, 2744, 2896, 3135, 3424, 3498, 3529, 2661, 2667, 2549, 2819, 2768, 2935, 3182, 2772, 3230, 3043, 2922, 3581, 3524, 2869, 2610, 3298, 2775, 3108, 2603, 3614, 2612, 2860, 3187, 3238, 3786, 4385, 3016, 3436, 2876, 2987, 3532, 3438, 3561, 3259, 2663, 2890, 3433, 3071, 3018, 2580, 2755, 3015, 2540, 3398, 2664, 2583, 2830, 2644, 2641, 3513, 2725, 2723, 3338, 3556, 2866, 2514, 2932, 2753, 2862, 2899, 2605, 2989, 3096, 3124, 2985, 2716, 3145, 3017, 2591, 2640, 3033, 1853, 3216, 3316, 3412, 2971, 3256, 3153, 3575, 3339, 2915, 2531, 3552, 3475, 3060, 3375, 2756, 3382, 2847, 2859, 3251, 3702, 3423, 2537, 2801, 3076, 2696, 3092, 3459, 3144, 3441, 2802, 3479, 2907, 3512, 3518, 3021, 2871, 3032, 2647, 2945, 3045, 2763, 3313, 3034, 3315, 3541, 2746, 2669, 2524, 3003, 2732, 3166, 3046, 3306, 2873, 3364, 3253, 3215, 3061, 2804, 2722, 2964, 2990, 2836, 4098, 4449, 3173, 2762, 3737, 2628, 3507, 2564, 3031, 2872, 3360, 2658, 2930, 2904, 3244, 3217, 3311, 3445, 2840, 3372, 2958, 3098, 3356, 3456, 3388, 2624, 3207, 2576, 2742, 2665, 2815, 3052, 3421, 2593, 3242, 2535, 2966, 2898, 2858, 2943, 2668, 2798, 3196, 2528, 2713, 3001, 2691, 2948, 2767, 2544, 3302, 2734, 2893, 2592, 2861, 3502, 2969, 2582, 3229, 2676, 2545, 3255, 3330, 2547, 3257, 2882, 3151, 3088, 2883, 3318, 2645, 2733, 2587, 3500, 3008, 2715, 2845, 3183, 2654, 3233, 3267, 2741, 2827, 2704, 3091, 2832, 2736, 3177, 3271, 2835, 2908, 3176, 2947, 3292, 3191, 2517, 3026, 3082, 3392, 3381, 2584, 2712, 3213, 3451, 2634, 3150, 2810, 3303, 2573, 3460, 2615, 3394, 2828, 3329, 4377, 4499, 3555, 2974, 3782, 3629, 3578, 3885, 2817, 3248, 2954, 3334, 3571, 3345, 3551, 3384, 3422, 1357, 1844, 2530, 2973, 4418, 4081, 3951, 1764, 1671, 1852, 334, 1843, 3449, 3185, 3399, 2786, 3055, 3472, 3397, 2601, 3564, 3277, 4373, 3548, 3179, 3407, 3841, 3347, 3142, 4255, 4431, 3241, 3077, 2700, 3147, 2648, 3283, 2829, 3278, 2581, 2536, 4363, 2848, 3410, 2797, 2523, 2520, 2721, 3496, 2571, 3198, 3219, 3030, 2673, 2921, 3837, 3301, 3322, 2705, 3239, 2949, 3369, 3396, 2892, 2897, 2766, 3174, 3297, 2550, 2889, 2933, 2793, 2627, 2677, 3119, 2596, 3226, 3172, 3089, 2868, 2839, 3942, 3120, 3286, 2843, 3465, 1564, 3946, 4222, 1504, 3999, 2682, 1875, 2865, 3539, 3168, 2864, 3308, 3557, 2940, 3109, 3503, 2625, 3455, 3114, 2595, 3331, 2978, 2518, 2521, 4079, 3024, 3573, 2952, 2653, 1769, 3180, 2813, 2652, 2600, 2816, 3201, 3188, 3270, 2997, 2992, 3009, 3520, 2936, 3275, 3165, 3447, 3131, 3305, 2809, 2792, 2729, 2814, 2619, 3266, 2825, 3066, 2857, 2998, 3064, 2681, 3035, 3279, 2764, 3480, 3127, 2912, 3010, 2607, 3211, 3111, 3041, 1573, 3909, 4269, 3487, 3489, 3019, 335, 1266, 1415, 2980, 3428, 1355, 3454, 2851, 2881, 3232, 3458, 3326, 3353, 2927, 3212, 2950, 3376, 3208, 3062, 3612, 3195, 3385, 2686, 2602, 3569, 3123, 2727, 1622, 2821, 2636, 2750, 2850, 3050, 2925, 3336, 3540, 2689, 3139, 2526, 3361, 3022, 3427, 3107, 3140, 3371, 3276, 2831, 3501, 2924, 3366, 3199, 3101, 3321, 3499, 2917, 2683, 2800, 2812, 3340, 3227, 3148, 3657, 4446, 1746, 1464, 1886, 2666, 3246, 3130, 3560, 3236, 2730, 3572, 1607, 3689, 2968, 1457, 1500, 909, 337, 1184, 3450, 2577, 2567, 2532, 3415, 2934, 2984, 2568, 4147, 4498, 1518, 3728, 3637, 3570, 3429, 4091, 2870, 2995, 4338, 3205, 2880, 3261, 1994, 3968, 4291, 4204, 4071, 4034, 1742, 2037, 352, 2820, 3912, 3287, 1218, 1190, 1959, 1840, 3736, 1283, 3861, 1383, 3644, 3691, 4259, 1749, 1418, 1176, 4216, 1924, 1421, 1387, 3992, 4423, 4253, 1618, 1871, 1256, 3748, 4119, 1297, 1586, 1251, 1299, 1954, 4450, 3990, 4029, 4097, 3890, 3796, 1389, 3711, 4344, 1578, 1476, 4343, 1202, 4413, 4384, 3808, 1647, 1475, 3892, 3674, 1739, 3926, 3595, 1943, 3756, 4405, 3973, 4109, 4159, 3744, 4387, 1960, 4275, 3781, 1535, 1210, 4492, 4365, 4118, 3655, 3886, 4278, 4383, 4485, 1392, 3751, 3931, 3986, 3678, 1249, 4353, 4208, 3710, 4238, 4213, 3969, 4436, 3175, 4128, 2970, 1228, 3534, 3437, 3406, 3641, 3639, 3954, 4335, 3995, 3582, 4475, 3784, 4470, 4010, 3802, 3941, 4427, 4396, 4348, 3587, 3818, 3864, 3956, 3863, 3731, 3814, 4067, 4354, 4350, 4334, 3821, 1932, 3929, 4171, 1258, 3824, 3631, 4465, 4494, 1320, 1398, 3828, 1204, 1223, 1284, 1685, 3773, 4209, 3014, 4462, 4246, 4190, 4312, 4023, 3760, 3753, 1178, 3884, 2783, 4038, 3545, 2916, 3112, 2834, 3880, 3673, 4102, 4399, 4048, 3752, 4207, 1235, 3943, 4355, 4087, 4100, 4327, 4037, 4163, 3918, 4486, 1243, 3933, 4178, 1662, 1643, 4152, 3634, 3617, 4445, 4303, 1370, 3838, 4199, 4284, 1213, 4382, 1399, 1187, 3714, 1828, 4487, 3615, 1842, 1501, 3746, 4018, 4420, 3606, 4121, 3724, 3935, 1941, 4419, 4282, 1955, 1949, 4310, 4488, 1577, 4127, 1288, 1171, 3670, 4052, 3627, 3777, 936, 1371, 3685, 1325, 1940, 380, 4482, 4258, 3812, 1581, 1860, 4124, 4508, 4500, 3652, 3972, 1309, 1630, 1528, 3717, 1217, 3692, 4430, 3764, 4316, 4285, 3645, 3971, 4421, 1172, 4026, 2740, 3125, 3546, 1725, 1206, 3842, 4404, 3690, 3962, 4513, 4340, 4329, 4410, 3703, 4136, 1763, 1487, 3589, 3907, 4153, 2707, 3730, 4426, 4180, 4041, 3923, 4444, 3851, 4429, 4361, 1441, 4394, 4302, 3758, 4510, 3742, 1868, 4077, 1710, 1939, 1335, 1666, 1407, 4187, 1193, 1188, 1196, 1724, 1717, 1200, 1646, 4176, 1232, 1989, 4125, 1741, 1508, 1580, 4060, 4378, 1576, 1212, 1893, 3921, 3585, 1174, 1396, 4061, 4015, 1207, 3698, 3825, 3922, 4021, 4181, 1598, 1916, 1429, 4502, 4231, 1321, 4390, 3693, 3734, 1382, 3684, 1747, 3806, 3896, 3635, 1768, 4025, 3976, 3840, 3963, 4286, 1502, 3836, 4161, 3659, 3743, 4130, 3605, 1385, 1783, 4392, 4328, 1316, 4173, 4265, 1246, 1985, 1629, 1829, 1737, 3826, 1473, 1992, 1883, 1656, 1837, 1914, 1839, 1834, 3984, 4495, 3910, 4160, 3671, 4184, 4132, 4250, 1503, 1237, 1523, 1417, 4063, 1562, 3977, 1971, 1707, 1847, 1792, 3769, 4074, 1534, 4239, 4003, 3915, 1689, 1776, 1599, 1265, 1410, 1823, 1498, 954, 955, 2437, 4139, 1482, 3602, 4434, 3721, 1592, 1825, 1698, 1519, 1352, 4202, 4409, 1977, 1917, 2382, 3675, 1833, 3974, 419, 4309, 4045, 3854, 3682, 2491, 444, 445, 1972, 2688, 4366, 3425, 3231, 3649, 2759, 2724, 3873, 3755, 1216, 3599, 3775, 2754, 2606, 3471, 3234, 2565, 2803, 2562, 2684, 3411, 3405, 2690, 1255, 3694, 446, 3985, 3535, 1306, 4084, 3282, 447, 1353, 2168, 3879, 2698, 1894, 1882, 1817, 1880, 490, 1018, 3917, 3616, 4311, 1800, 4473, 4085, 4401, 1310, 3783, 3765, 1538, 3870, 491, 1948, 3699, 1735, 3792, 4290, 2074, 492, 1019, 2012, 1803, 3642, 497, 1322, 1261, 4027, 3478, 3763, 2959, 1293, 2462, 517, 3197, 1595, 3413, 1675, 1616, 1901, 1796, 1517, 4331, 4332, 4466, 2719, 3803, 4123, 4233, 1824, 3129, 3087, 3505, 4158, 4254, 1449, 2121, 1044, 3720, 4351, 4414, 1673, 3453, 3254, 2501, 1050, 3515, 2219, 1433, 1323, 4301, 1569, 1465, 1437, 1674, 4337, 1285, 4268, 1183, 3726, 3881, 4134, 4347, 4012, 3938, 4066, 4198, 4416, 4164, 3630, 4229, 4292, 4193, 4325, 4375, 4371, 4432, 4215, 1753, 3944, 1409, 4195, 1729, 4223, 1540, 4455, 1068, 1069, 4512, 1723, 1070, 3750, 3633, 4070, 4104, 4162, 4235, 1863, 4346, 1881, 1360, 1551, 3733, 4111, 3993, 4108, 3949, 1287, 1713, 1556, 1736, 1995, 1435, 1424, 1830, 1705, 1861, 1197, 1254, 4120, 1545, 4417, 1469, 1292, 1858, 596, 597, 598, 1453, 2559, 2590, 2738, 4478, 4069, 1809, 1327, 4150, 3260, 3481, 3672, 3625, 2008, 4439, 3852, 3997, 1411, 599, 3847, 4993, 1268, 4050, 3377, 4424, 1496, 4143, 4493, 3492, 1962, 1412, 2324, 605, 1368, 3827, 4103, 606, 607, 1113, 3735, 3390, 1694, 3431, 2838, 3483, 3464, 3848, 2558, 3314, 3086, 3029, 2956, 3517, 2651, 2914, 2680, 2632, 3121, 3100, 3528, 3526, 3084, 4220, 3304, 2846, 1186, 3235, 2903, 3559, 2687, 3409, 3237, 2900, 2999, 3349, 3171, 2752, 3262, 3504, 3047, 4376, 3193, 3430, 2525, 2670, 2911, 3508, 2776, 2697, 3200, 2790, 3323, 2543, 2874, 2614, 3904, 3373, 3054, 2617, 4242, 3621, 2708, 4179, 4398, 3959, 4935, 1269, 3095, 1286, 3624, 4481, 1432, 3511, 2735, 4381, 3295, 1585, 2390, 1568, 4035, 2910, 3391, 2808, 3099, 2913, 3676, 2852, 3284, 2731, 1609, 2375, 2201, 3537, 3994, 1319, 4467, 1802, 1227, 1623, 702, 703, 4031, 4305, 1636, 1393, 2010, 3810, 4452, 3677, 4227, 1277, 1400, 4402, 4157, 4197, 1337, 1253, 1532, 4028, 3989, 2449, 4715, 704, 2050, 1493, 1854, 1902, 1510, 4879, 1841, 4234, 4924, 1154, 1314, 4096, 2023, 3815, 2005, 1964, 3439, 2833, 4287, 4509, 4505, 4267, 3697, 3272, 4112, 2967, 3651, 1991, 1805, 1628, 3705, or 2250.

[0207] A VP capsid polypeptide may have a 581 to 589 region having a sequence of SEQ ID NO: 5014, wherein X³ of SEQ ID NO: 5014 is K or R. In some embodiments, the 581 to 589 region has a sequence of any one of SEQ ID NOs: 4177, 1289, 740, 741, 18, 745, 3477, 1548, 3051, 2982, 2877, 3036, 3426, 3073, 3169, 747, 3362, 2784, 21, 3192, 23, 1638, 748, 1703, 1836, 3660, 29, 750, 1640, 33, 34, 35, 36, 37, 38, 1205, 3795, 753, 4288, 4219, 2770, 2962, 4241, 4107, 2718, 3317, 4391, 4053, 3263, 2553, 3947, 2710, 2608, 3467, 2796, 2961, 2529, 3320, 2674, 2635, 3446, 3053, 3250, 3688, 1182, 1998, 4320, 3351, 2655, 3514, 2779, 3194, 3319, 3224, 3281, 3708, 2807, 3562, 3274, 3374, 3013, 3416, 2981, 3065, 2777, 3469, 2977, 2638, 2972, 3059, 2574, 3380, 4262, 3167, 3368, 2781, 3547, 3386, 1225, 2960, 3485, 3370, 3443, 2824, 3327, 3178, 3006, 3252, 2991, 3470, 2888, 2572, 3418, 2642, 2519, 3363, 40, 2633, 41, 42, 43, 755, 45, 756, 46, 48, 1952, 758, 49, 3122, 2551, 3718, 3484, 3577, 759, 1230, 3960, 1378, 2994, 3080, 2589, 3681, 760, 53, 3925, 55, 3654, 56, 61, 4086, 1740, 1660, 765, 766, 62, 1966, 63, 64, 768, 771, 65, 66, 67, 68, 3816, 2599, 2706, 74, 3865, 1549, 1361, 3882, 3713, 1942, 1312, 4501, 76, 77, 1560, 4289, 3757, 79, 3593, 4043, 1806, 3908, 4397, 1615, 4415, 3723, 2006, 3754, 1470, 4360, 3945, 2854, 3523, 3669, 82, 4065, 83, 1294, 1484, 3891, 4456, 4040, 4496, 1982, 2001, 1478, 1189, 1490, 1885, 1926, 89, 90, 91, 779, 1180, 92, 785, 786, 94, 95, 1831, 1867, 4458, 97, 1970, 1936, 1590, 100, 789, 790, 1298, 101, 1688, 791, 792, 2007, 103, 794, 795, 104, 105, 106, 1849, 108, 1579, 110, 1906, 113, 1444, 1344, 116, 802, 117, 118, 121, 803, 804, 1463, 805, 122, 124, 125, 127, 807, 132, 809, 810, 133, 1978, 812, 135, 136, 137, 138, 813, 140, 815, 1326, 141, 142, 143, 144, 145, 1634, 1302, 817, 146, 818, 147, 148, 149, 151, 152, 153, 154, 155, 819, 820, 157, 159, 160, 163, 164, 165, 166, 822, 167, 168, 169, 170, 171, 823, 824, 1651, 173, 1483, 174, 175, 825, 176, 177, 826, 827, 181, 828, 182, 829, 184, 185, 186, 187, 188, 189, 830, 191, 192, 193, 194, 195, 196, 1391, 197, 200, 201, 202, 203, 204, 205, 832, 833, 206, 834, 836, 1334, 837, 3901, 3312, 2649, 1301, 211, 212, 1450, 4386, 3028, 213, 1446, 214, 215, 1896, 1522, 3490, 838, 217, 218, 219, 1612, 220, 221, 222, 839, 223, 840, 224, 226, 227, 230, 231, 842, 232, 233, 844, 236, 237, 851, 852, 853, 1536, 240, 854, 242, 243, 244, 245, 246, 247, 249, 250, 251, 252, 253, 254, 255, 857, 256, 257, 258, 259, 858, 859, 260, 261, 860, 861, 862, 262, 264, 1241, 265, 266, 866, 1477, 267, 867, 869, 870, 271, 871, 872, 272, 1252, 273, 1591, 275, 1980, 276, 876, 877, 277, 278, 279, 1892, 1539, 880, 1295, 3601, 3877, 1930, 1420, 1678, 1460, 282, 1799, 283, 1626, 1374, 287, 1620, 1290, 1354, 888, 291, 1956, 889, 292, 4324, 293, 4138, 891, 3903, 297, 3829, 3809, 4271, 3844, 1436, 1515, 1617, 1961, 304, 306, 1589, 4370, 308, 309, 894, 3646, 4059, 1431, 1331, 312, 895, 1779, 313, 314, 315, 316, 896, 1558, 1552, 898, 321, 322, 899, 1958, 901, 325, 902, 326, 1491, 329, 330, 905, 4484, 1756, 3536, 2701, 2799, 3332, 3294, 3159, 3069, 2637, 3025, 2782, 3247, 3350, 2692, 2586, 3004, 3049, 2694, 2650, 3554, 2983, 3403, 3214, 3163, 2541, 3090, 3097, 3462, 1430, 2941, 3486, 2842, 3558, 3104, 3037, 3419, 2780, 2931, 1276, 2928, 2609, 3068, 3128, 2548, 2538, 2618, 2789, 3228, 2657, 3189, 2863, 3307, 3300, 2546, 3048, 3543, 2946, 2975, 3346, 3067, 2728, 2955, 3408, 3027, 3094, 3203, 2988, 2751, 2953, 2566, 2578, 2823, 3063, 3335, 3000, 3181, 3011, 3138, 3389, 2805, 3074, 2894, 3149, 2560, 3417, 3265, 3378, 2901, 2837, 2822, 2745, 3473, 3530, 3040, 2597, 3509, 3522, 3161, 2926, 3209, 3105, 3400, 2630, 2905, 2671, 2818, 2806, 2702, 2709, 3549, 3538, 2534, 2773, 2623, 3491, 3243, 3136, 2693, 3164, 3343, 2918, 2555, 2794, 2679, 3510, 3110, 2672, 3442, 2929, 3184, 3488, 3093, 2996, 3141, 3544, 3102, 2856, 2957, 3466, 3461, 2788, 2660, 3344, 3204, 2720, 3379, 2826, 1789, 2785, 3249, 3527, 4460, 3352, 2569, 4457, 2011, 4319, 3906, 1533, 1755, 1888, 4248, 1557, 1404, 4188, 1330, 4349, 3337, 3533, 2629, 3038, 2539, 3567, 3291, 3348, 3115, 3359, 2993, 3079, 3506, 2527, 2963, 2938, 2516, 3113, 1345, 2639, 3143, 3044, 2747, 3154, 3280, 3039, 2743, 2902, 3056, 2554, 2522, 3103, 3210, 3434, 2656, 4251, 4166, 4196, 3206, 3328, 2588, 3553, 2714, 3078, 3222, 3137, 3357, 2717, 2944, 3012, 3220, 3202, 2811, 3083, 3269, 3566, 2699, 2515, 3023, 2533, 3288, 3075, 3005, 2685, 3058, 2976, 2622, 3333, 3463, 2939, 3521, 3268, 3117, 2626, 2616, 3240, 2570, 3565, 2919, 3157, 2849, 3444, 2631, 3420, 2659, 3325, 3186, 2920, 3258, 3440, 3457, 3310, 2761, 3134, 2621, 3531, 2711, 2774, 2867, 2585, 3155, 2620, 3156, 2844, 3126, 3160, 2909, 3542, 3225, 2887, 3474, 3218, 2744, 2896, 3135, 3424, 3498, 3529, 2661, 2667, 2549, 2819, 2768, 2935, 3182, 2772, 3230, 3043, 2922, 3581, 3524, 2869, 2610, 3298, 2775, 3108, 2603, 3614, 2612, 2860, 3187, 3238, 3786, 4385, 3016, 3436, 2876, 2987, 3532, 3438, 3561, 3259, 2663, 2890, 3433, 3071, 3018, 2580, 2755, 3015, 2540, 3398, 2664, 2583, 2830, 2644, 2641, 3513, 2725, 2723, 3338, 3556, 2866, 2514, 2932, 2753, 2862, 2899, 2605, 2989, 3096, 3124, 2985, 2716, 3145, 3017, 2591, 2640, 3033, 1853, 3216, 3316, 3412, 2971, 3256, 3153, 3575, 3339, 2915, 2531, 3552, 3475, 3060, 3375, 2756, 3382, 2847, 2859, 3251, 3702, 3423, 2537, 2801, 3076, 2696, 3092, 3459, 3144, 3441, 2802, 3479, 2907, 3512, 3518, 3021, 2871, 3032, 2647, 2945, 3045, 2763, 3313, 3034, 3315, 3541, 2746, 2669, 2524, 3003, 2732, 3166, 3046, 3306, 2873, 3364, 3253, 3215, 3061, 2804, 2722, 2964, 2990, 2836, 4098, 4449, 3173, 2762, 3737, 2628, 3507, 2564, 3031, 2872, 3360, 2658, 2930, 2904, 3244, 3217, 3311, 3445, 2840, 3372, 2958, 3098, 3356, 3456, 3388, 2624, 3207, 2576, 2742, 2665, 2815, 3052, 3421, 2593, 3242, 2535, 2966, 2898, 2858, 2943, 2668, 2798, 3196, 2528, 2713, 3001, 2691, 2948, 2767, 2544, 3302, 2734, 2893, 2592, 2861, 3502, 2969, 2582, 3229, 2676, 2545, 3255, 3330, 2547, 3257, 2882, 3151, 3088, 2883, 3318, 2645, 2733, 2587, 3500, 3008, 2715, 2845, 3183, 2654, 3233, 3267, 2741, 2827, 2704, 3091, 2832, 2736, 3177, 3271, 2835, 2908, 3176, 2947, 3292, 3191, 2517, 3026, 3082, 3392, 3381, 2584, 2712, 3213, 3451, 2634, 3150, 2810, 3303, 2573, 3460, 2615, 3394, 2828, 3329, 4377, 4499, 3555, 2974, 3782, 3629, 3578, 3885, 2817, 3248, 2954, 3334, 3571, 3345, 3551, 3384, 3422, 1357, 1844, 2530, 2973, 4418, 4081, 3951, 1764, 1671, 1843, 3449, 3185, 3399, 2786, 3055, 3472, 3397, 2601, 3564, 3277, 4373, 3548, 3179, 3407, 3841, 3347, 3142, 4255, 4431, 3241, 3077, 2700, 3147, 2648, 3283, 2829, 3278, 2581, 2536, 4363, 2848, 3410, 2797, 2523, 2520, 2721, 3496, 2571, 3198, 3219, 3030, 2673, 2921, 3837, 3301, 3322, 2705, 3239, 2949, 3369, 3396, 2892, 2897, 2766, 3174, 3297, 2550, 2889, 2933, 2793, 2627, 2677, 3119, 2596, 3226, 3172, 3089, 2868, 2839, 3942, 3120, 3286, 2843, 3465, 1564, 3946, 4222, 1504, 3999, 2682, 1875, 2865, 3539, 3168, 2864, 3308, 3557, 2940, 3109, 3503, 2625, 3455, 3114, 2595, 3331, 2978, 2518, 2521, 4079, 3024, 3573, 2952, 2653, 1769, 3180, 2813, 2652, 2600, 2816, 3201, 3188, 3270, 2997, 2992, 3009, 3520, 2936, 3275, 3165, 3447, 3131, 3305, 2809, 2792, 2729, 2814, 2619, 3266, 2825, 3066, 2857, 2998, 3064, 2681, 3035, 3279, 2764, 3480, 3127, 2912, 3010, 2607, 3211, 3111, 3041, 1573, 3909, 4269, 3487, 3489, 3019, 335, 1266, 3435, 3482, 3020, 2748, 2646, 2787, 2760, 2563, 3085, 3133, 3158, 3170, 2703, 3494, 2552, 3395, 3245, 3404, 2675, 2791, 1911, 908, 1935, 2749, 3341, 3355, 2575, 2942, 2886, 2758, 2594, 3495, 2884, 3516, 3042, 2737, 2923, 3563, 2855, 3476, 2611, 2937, 3383, 3497, 3402, 3162, 2662, 2875, 3223, 2878, 1808, 3285, 2757, 3057, 2951, 3519, 2579, 2853, 3387, 3401, 3493, 3393, 1608, 3365, 2885, 3574, 3081, 3007, 3568, 3152, 3367, 3358, 336, 3468, 3290, 3550, 3132, 2726, 2879, 3190, 3309, 2613, 2765, 3106, 1355, 3454, 2851, 2881, 3232, 3458, 3326, 3353, 2927, 3212, 2950, 3376, 3208, 3062, 3612, 3195, 3385, 2686, 2602, 3569, 3123, 2727, 1622, 2821, 2636, 2750, 2850, 3050, 2925, 3336, 3540, 2689, 3139, 2526, 3361, 3022, 3427, 3107, 3140, 3371, 3276, 2831, 3501, 2924, 3366, 3199, 3101, 3321, 3499, 2917, 2683, 2800, 2812, 3340, 3227, 3148, 3657, 4446, 1746, 1464, 1886, 2666, 3246, 3130, 3560, 3236, 2730, 3572, 1607, 3689, 2968, 1457, 1500, 909, 337, 1184, 3450, 2577, 2567, 2532, 3415, 2934, 2984, 2568, 4147, 3002, 2986, 2979, 2542, 1762, 4472, 1472, 1529, 4057, 1976, 4507, 1583, 338, 911, 1711, 340, 912, 2013, 341, 4440, 917, 344, 918, 919, 921, 922, 347, 351, 923, 924, 4498, 1518, 3728, 3637, 3570, 3429, 4091, 2870, 2995, 4338, 3205, 2880, 3261, 1994, 3968, 4291, 4204, 4071, 4034, 1742, 2820, 3912, 3287, 4145, 354, 925, 1782, 926, 927, 3610, 357, 359, 4224, 1918, 1959, 3736, 1770, 931, 4155, 364, 1279, 365, 1543, 367, 4049, 1633, 1722, 368, 369, 1495, 1566, 370, 1211, 1873, 4142, 1434, 1358, 1191, 3732, 4110, 4039, 4411, 4506, 4270, 4156, 3780, 4036, 4030, 4016, 1550, 3899, 1247, 1855, 1181, 3919, 1639, 3664, 1244, 4140, 3930, 4117, 4189, 4001, 3799, 3643, 3619, 1240, 1686, 1479, 1307, 1575, 4296, 1665, 3871, 4135, 1605, 4408, 3604, 1274, 3741, 1938, 3709, 1727, 3893, 1280, 3622, 1784, 3834, 1752, 1983, 1743, 3979, 4461, 4113, 3817, 4232, 1340, 1489, 4214, 1219, 1486, 1512, 1481, 1516, 3820, 3789, 4252, 4047, 4330, 4082, 4094, 1574, 1248, 4078, 1872, 1426, 3785, 3687, 4318, 4243, 3866, 3704, 4172, 1621, 4315, 1192, 1513, 1856, 3324, 2769, 2678, 1561, 3296, 377, 1395, 4453, 3940, 3778, 4374, 4210, 4009, 4264, 4339, 4368, 1738, 378, 1610, 4194, 4474, 4013, 4266, 1771, 3860, 3832, 1349, 1381, 3663, 1642, 1185, 4356, 3932, 1233, 4212, 3858, 1198, 4192, 3611, 1919, 1819, 3790, 3712, 1969, 4095, 1887, 4468, 1720, 4247, 2002, 1657, 1663, 1336, 3894, 1554, 1494, 1405, 3576, 4314, 3695, 1851, 4362, 1815, 3845, 4511, 3656, 3638, 1406, 1596, 4454, 1443, 1661, 1359, 1734, 3650, 1910, 1648, 3831, 4435, 1208, 1988, 4451, 1993, 1986, 3849, 1718, 4068, 1835, 1425, 1428, 1282, 4380, 1658, 1452, 1687, 4024, 379, 4072, 3791, 4491, 4323, 4014, 1304, 1440, 1511, 1981, 1676, 1547, 4422, 4450, 3990, 4029, 4097, 3890, 3796, 1389, 3711, 4344, 1578, 1476, 4343, 1202, 4413, 4384, 3808, 1647, 1475, 3892, 3674, 1739, 3926, 3595, 1943, 3756, 4405, 3973, 4109, 4159, 3744, 4387, 1960, 4275, 3781, 1535, 1210, 4492, 4365, 4118, 3655, 3886, 4278, 4383, 4485, 1392, 3751, 3931, 3986, 3678, 1249, 4353, 4208, 3710, 4238, 4213, 3969, 4436, 3175, 4128, 2970, 1228, 3534, 3437, 3406, 3641, 3639, 3954, 4335, 3995, 3582, 4475, 3784, 4470, 4010, 3802, 3941, 4427, 4396, 4348, 3587, 3818, 3864, 3956, 3863, 3731, 3814, 4067, 4354, 4350, 4334, 3821, 1932, 3929, 4171, 1258, 3824, 3631, 4465, 4494, 1320, 1398, 3828, 1204, 1223, 1284, 1685, 3773, 4209, 3014, 4462, 4246, 4190, 4312, 4023, 3760, 3753, 1178, 3884, 2783, 4038, 3545, 2916, 3112, 2834, 3880, 3673, 4102, 4399, 4048, 3752, 4207, 1235, 3943, 4355, 4087, 4100, 4327, 4037, 4163, 3918, 4486, 1243, 3933, 4178, 1662, 1643, 4152, 3634, 3617, 4445, 4303, 1370, 3838, 4199, 4284, 1213, 4382, 1399, 1187, 3714, 1828, 4487, 3615, 1842, 1501, 3746, 4018, 4420, 3606, 4121, 3724, 3935, 1941, 4419, 4282, 1955, 1949, 4310, 4488, 1577, 4127, 1288, 1171, 3670, 4052, 1860, 4124, 4508, 4500, 3652, 3972, 1309, 1630, 1528, 3717, 1217, 3692, 4430, 3764, 4316, 4285, 3645, 3971, 4421, 1172, 4026, 2740, 3125, 3546, 1725, 1206, 3842, 4404, 3690, 3962, 4513, 4340, 4329, 4410, 3703, 4136, 1763, 1487, 3589, 3907, 4153, 2707, 3730, 4426, 4180, 4041, 3923, 4444, 3851, 4429, 4361, 1441, 4394, 4302, 3758, 4510, 3742, 1868, 4077, 1710, 1939, 1335, 1997, 1975, 1701, 4280, 1613, 4006, 1984, 1351, 3653, 3833, 1593, 2561, 4442, 3900, 4298, 1761, 4388, 1820, 1597, 4317, 4249, 1341, 1680, 4441, 3628, 3725, 1945, 4206, 1588, 1439, 3794, 4447, 1838, 3776, 3658, 4064, 1377, 4011, 4272, 4503, 1367, 3594, 3680, 1300, 1750, 3913, 3774, 1877, 1987, 1862, 3998, 1380, 4185, 3686, 3696, 4463, 1350, 4008, 4230, 3853, 4244, 4083, 381, 1909, 3897, 1546, 3613, 3273, 3452, 3525, 1229, 4105, 3835, 383, 1234, 3970, 1492, 3856, 3586, 1175, 4321, 4020, 4144, 1224, 1199, 3667, 2778, 4412, 4407, 1812, 1810, 3823, 1416, 1427, 1507, 1878, 4333, 3146, 4281, 4211, 1179, 3843, 1669, 1677, 1524, 1525, 1974, 384, 1979, 1456, 1239, 4167, 3740, 1876, 1388, 1967, 1474, 385, 1342, 1508, 1580, 4060, 4378, 1576, 1212, 1893, 3921, 3585, 1174, 1396, 4061, 4015, 1207, 3698, 3825, 3922, 4021, 4181, 1598, 1916, 1429, 4502, 4231, 1321, 4390, 3693, 3734, 1382, 3684, 1747, 3806, 3896, 3635, 1768, 4025, 3976, 3840, 3963, 4286, 1502, 3836, 4161, 3659, 3743, 4130, 3605, 1385, 1783, 4392, 4328, 1316, 4173, 4265, 1246, 1985, 1629, 1829, 1737, 1837, 1914, 1839, 1834, 3984, 4495, 3910, 4160, 3671, 4184, 4132, 4250, 1503, 1237, 1523, 1417, 4063, 1562, 3977, 1971, 1707, 1847, 1792, 3769, 4074, 1534, 4239, 4003, 3915, 1689, 1776, 1599, 1265, 1655, 3874, 4261, 3626, 1791, 3579, 1644, 3936, 4054, 4260, 4359, 4131, 4297, 4357, 4022, 3770, 4046, 1222, 1996, 3788, 4169, 1925, 3953, 4228, 4226, 4277, 4101, 1889, 1369, 3797, 4088, 4019, 3771, 3632, 1402, 1520, 1767, 1466, 1194, 4137, 1908, 1927, 1758, 3772, 3661, 4186, 4174, 1170, 3850, 1315, 1611, 1530, 3596, 1461, 1848, 1173, 1928, 1459, 1765, 1826, 3719, 1931, 3584, 4004, 3591, 3967, 4168, 3957, 3878, 4165, 4191, 3980, 4058, 4200, 4336, 3958, 1260, 4051, 3798, 4032, 1774, 4322, 3991, 4106, 1641, 1570, 3978, 3965, 4464, 3813, 4154, 1365, 4257, 3846, 4345, 4379, 3603, 1693, 3937, 3801, 1787, 1214, 4483, 4201, 1898, 4245, 1347, 3867, 1900, 3640, 3916, 4089, 1209, 3745, 3988, 3975, 4236, 4075, 4146, 4256, 4308, 4000, 4148, 3588, 3868, 4403, 3883, 4326, 4393, 3895, 4237, 3955, 3727, 4005, 4092, 4372, 4283, 1553, 3805, 4151, 1281, 1681, 4489, 3982, 4437, 3597, 4342, 3872, 3987, 4490, 3876, 3668, 4300, 1679, 1242, 3598, 3583, 3647, 389, 4304, 3793, 3779, 1937, 1907, 4042, 3648, 3996, 3800, 4367, 4099, 1807, 3887, 4428, 1625, 1390, 1884, 1682, 4364, 4306, 3869, 1278, 1672, 942, 1505, 1542, 1709, 1915, 3600, 3914, 1968, 3948, 1670, 3811, 1865, 1362, 1716, 3961, 1506, 4221, 1376, 1683, 4276, 1445, 1721, 1632, 3607, 1328, 1455, 1913, 1497, 1317, 1951, 1778, 1379, 3768, 4225, 1668, 390, 391, 4406, 4341, 1480, 395, 1714, 1422, 396, 397, 3618, 4433, 1177, 3898, 398, 949, 950, 399, 951, 400, 1965, 4471, 952, 402, 2475, 403, 404, 4139, 1482, 3602, 4434, 3721, 1592, 1519, 1352, 4202, 4409, 1977, 1917, 407, 408, 1631, 1684, 409, 3889, 958, 959, 412, 960, 414, 415, 961, 1905, 416, 963, 417, 3675, 1833, 3974, 420, 421, 965, 966, 969, 970, 422, 1897, 423, 4133, 3830, 972, 424, 973, 427, 1708, 4141, 3749, 431, 1619, 975, 4044, 3590, 1944, 4126, 1923, 1706, 4400, 434, 1606, 979, 2604, 2895, 436, 3448, 1692, 983, 3862, 4055, 4358, 984, 985, 1664, 445, 1972, 2688, 4366, 3425, 3231, 3649, 2759, 2724, 3873, 3755, 1216, 3599, 3775, 2754, 2606, 3471, 3234, 2565, 2803, 2562, 2684, 3411, 3405, 2690, 1255, 3694, 3535, 1306, 4084, 3282, 1780, 987, 988, 990, 451, 452, 991, 992, 1728, 994, 995, 454, 1696, 3116, 1869, 456, 1386, 999, 3879, 2698, 1001, 461, 1447, 462, 464, 4425, 1645, 1231, 1468, 472, 473, 476, 1273, 1007, 1744, 1488, 1659, 477, 1604, 481, 4313, 482, 483, 1499, 484, 1016, 4073, 1777, 1458, 4274, 487, 1775, 4205, 1526, 1697, 1017, 2000, 489, 3917, 3616, 4311, 1800, 4473, 4085, 4401, 1310, 3783, 3765, 491, 1948, 3699, 1735, 3792, 4290, 495, 4090, 496, 2012, 1803, 3642, 1322, 498, 1021, 1022, 502, 1333, 503, 1023, 1890, 510, 1026, 3608, 1732, 511, 2397, 1864, 1816, 1531, 3636, 1699, 1027, 1029, 1366, 2112, 1261, 4027, 3478, 3763, 2959, 517, 3197, 1595, 3413, 1448, 518, 1675, 1797, 520, 1999, 3759, 1215, 4122, 1730, 524, 526, 3966, 3911, 529, 3289, 1821, 530, 531, 1874, 1038, 536, 537, 3767, 1929, 1041, 1042, 3683, 542, 1338, 4331, 4332, 4466, 2719, 3803, 4123, 4233, 1824, 3129, 3087, 3505, 4158, 4254, 1449, 3720, 4351, 4414, 1673, 3453, 3254, 1649, 546, 4240, 3580, 1046, 1047, 550, 2598, 551, 552, 3819, 1259, 4062, 2841, 1050, 3515, 4301, 1052, 1053, 3738, 1567, 1270, 3857, 1055, 1257, 1238, 3662, 561, 562, 1058, 4203, 1899, 3981, 1062, 1303, 4116, 567, 1946, 3620, 1514, 4002, 3679, 3964, 3707, 3666, 1348, 4273, 1804, 4497, 1401, 4438, 1895, 1264, 572, 1912, 3939, 4170, 4056, 1271, 1065, 1521, 1221, 1451, 1654, 3934, 4080, 4352, 1700, 3739, 1565, 1419, 1811, 3950, 1690, 1397, 3716, 1437, 1674, 4337, 1285, 4268, 1183, 3726, 3881, 4134, 4347, 4012, 3938, 4066, 4198, 4416, 4164, 3630, 4229, 4292, 4193, 4325, 4375, 4371, 4432, 4215, 1753, 3944, 1409, 4195, 1729, 4223, 1540, 1723, 1070, 3750, 3633, 4070, 4104, 4162, 4235, 1863, 4346, 1881, 1814, 1572, 4443, 3761, 1346, 1587, 1072, 3592, 576, 1891, 4469, 1275, 1950, 1963, 4129, 1296, 1551, 3733, 4111, 3993, 4108, 3949, 1287, 1713, 1736, 1995, 1435, 1424, 1830, 1705, 1861, 1197, 1254, 4120, 1545, 4417, 1469, 1785, 1236, 4293, 3839, 3983, 4395, 1957, 3928, 4295, 3715, 3855, 3609, 1990, 4076, 4175, 3927, 1757, 1650, 4299, 1773, 2004, 1267, 1364, 1462, 1879, 4007, 3729, 3665, 3722, 1691, 1624, 1751, 1394, 3924, 3952, 580, 581, 2003, 1343, 1559, 1250, 1555, 4114, 1818, 1075, 1076, 1077, 1704, 4448, 1078, 1079, 1786, 585, 3354, 1832, 3432, 2891, 2505, 1903, 1081, 1082, 4459, 1083, 1563, 590, 591, 1085, 594, 1453, 2559, 2590, 2738, 4478, 4069, 1809, 1327, 4150, 3260, 3481, 3672, 3625, 2008, 4439, 3852, 3997, 1411, 599, 3847, 1268, 4050, 3377, 4424, 1496, 4143, 4493, 3492, 1962, 600, 601, 4017, 4477, 1794, 4263, 3072, 2009, 1754, 1087, 1088, 3888, 1368, 3827, 4103, 606, 1090, 1571, 1091, 1438, 1092, 1093, 612, 1094, 3701, 4389, 613, 1603, 1332, 1715, 4369, 1652, 1096, 617, 1541, 618, 1921, 1733, 1373, 1870, 619, 4218, 1798, 1100, 1702, 1101, 1667, 1384, 623, 3700, 1788, 1600, 624, 626, 2771, 627, 1339, 3875, 628, 629, 3070, 4860, 2557, 2795, 2906, 3118, 1614, 1947, 4479, 3766, 632, 1104, 1105, 633, 1813, 636, 3706, 1110, 640, 1111, 641, 642, 1694, 3431, 2838, 3483, 3464, 3848, 2558, 3314, 3086, 3029, 2956, 3517, 2651, 2914, 2680, 2632, 3121, 3100, 3528, 3526, 3084, 4220, 3304, 2846, 1186, 3235, 2903, 3559, 2687, 3409, 3237, 2900, 2999, 3349, 3171, 2752, 3262, 3504, 3047, 4376, 3193, 3430, 2525, 2670, 2911, 3508, 2776, 2697, 3200, 2790, 3323, 2543, 2874, 2614, 3904, 3373, 3054, 2617, 4242, 3621, 2708, 4179, 4398, 3959, 3095, 1286, 3624, 4481, 1432, 3511, 2735, 4381, 3295, 1585, 1114, 1766, 3221, 2643, 2739, 3920, 644, 1116, 645, 646, 647, 1801, 4279, 3762, 1637, 1509, 1119, 2965, 2369, 2695, 3293, 650, 651, 1120, 652, 1121, 3264, 655, 658, 659, 4035, 2910, 3391, 2808, 3099, 2913, 3676, 2852, 3284, 2731, 1609, 3994, 1319, 4467, 1802, 1227, 1623, 662, 663, 664, 1124, 1125, 1128, 1129, 668, 669, 1130, 670, 1131, 1527, 1132, 671, 1772, 1135, 672, 1933, 1731, 1793, 675, 676, 3342, 1138, 1139, 677, 679, 1142, 1143, 681, 1145, 682, 685, 3822, 689, 690, 691, 1147, 1601, 3905, 694, 695, 1414, 1150, 1795, 1372, 1695, 1866, 4115, 1719, 698, 1920, 699, 700, 1544, 4305, 1636, 1393, 2010, 3810, 4452, 3677, 4227, 1277, 1400, 4402, 4157, 4197, 1337, 1253, 1532, 4028, 3989, 1493, 1854, 1902, 1510, 4182, 706, 707, 708, 4476, 1245, 714, 1841, 4234, 1314, 4096, 717, 1155, 4217, 1156, 723, 1157, 1627, 725, 1159, 1953, 1160, 1201, 727, 3787, 3747, 730, 1846, 3815, 2005, 1964, 1822, 1262, 4480, 1537, 1291, 1318, 4294, 1582, 734, 3439, 2833, 4287, 4509, 4505, 4267, 3697, 3272, 4112, 2967, 3651, 1628, 3705, 1195, 3859, 1164, 1165, 1166, 1745, 1973, 1168, 3807, 4307, 1454, or 1781.

[0208] A VP capsid polypeptide may have a 581 to 589 region having a sequence of SEQ ID NO: 5014, wherein X⁴ of SEQ ID NO: 5014 is K or R. In some embodiments, the 581 to 589 region has a sequence of any one of SEQ ID NOs: 739, 4177, 1289, 15, 743, 3477, 3051, 2982, 2877, 746, 3036, 3426, 3073, 3169, 3362, 2784, 3192, 1638, 25, 1703, 1836, 3660, 30, 32, 752, 1653, 2770, 2962, 4241, 4107, 2718, 3317, 4391, 4053, 3263, 2553, 3947, 2710, 2608, 3467, 2796, 2961, 2529, 3320, 2674, 2635, 3446, 3053, 3250, 3688, 1182, 3351, 2655, 3514, 2779, 3194, 3319, 3224, 3281, 3708, 2807, 3562, 3274, 3374, 3013, 3416, 2981, 3065, 2777, 3469, 2977, 2638, 2972, 3059, 2574, 3380, 4262, 3167, 3368, 2781, 3547, 3386, 1225, 2960, 3485, 3370, 3443, 2824, 1467, 3327, 3178, 3006, 3252, 2991, 3470, 2888, 2572, 3418, 2642, 2519, 3363, 2633, 757, 1952, 3122, 2551, 3718, 2216, 3484, 3577, 1308, 1230, 3960, 2994, 3080, 2589, 3681, 51, 761, 3925, 3654, 763, 764, 57, 4086, 1740, 767, 772, 2599, 2706, 70, 3865, 1549, 1361, 3882, 1942, 1312, 4501, 1413, 3593, 4043, 1806, 3908, 4397, 1615, 2006, 3945, 2854, 3523, 3669, 1356, 777, 4065, 84, 1484, 778, 87, 3891, 4456, 4040, 4496, 2001, 1478, 1189, 1490, 1885, 2270, 1180, 786, 4458, 1970, 1590, 98, 1298, 101, 1688, 794, 107, 1849, 797, 1579, 111, 112, 113, 1444, 801, 114, 115, 119, 120, 122, 1760, 123, 124, 806, 125, 126, 127, 128, 129, 130, 134, 811, 814, 139, 1326, 144, 816, 1302, 150, 152, 821, 160, 161, 162, 1651, 1483, 179, 180, 183, 185, 187, 1391, 198, 199, 831, 204, 833, 207, 3901, 3312, 2649, 1301, 4386, 3028, 1896, 1522, 3490, 216, 218, 1612, 225, 228, 229, 234, 239, 849, 850, 1536, 241, 246, 248, 855, 249, 252, 253, 261, 4966, 864, 263, 4749, 2296, 1241, 866, 268, 868, 269, 270, 873, 874, 1252, 273, 1591, 274, 1980, 878, 1539, 3601, 3877, 1930, 1420, 1678, 1460, 1799, 1374, 1290, 1354, 290, 2391, 4324, 294, 4138, 3903, 892, 3829, 298, 3844, 1436, 300, 1515, 1617, 1961, 303, 1589, 893, 4370, 3646, 4059, 1331, 1558, 1552, 320, 1958, 1491, 1635, 332, 3536, 2701, 2799, 3332, 3294, 3159, 3069, 2637, 3025, 2782, 3247, 3350, 2692, 2586, 3004, 3049, 2694, 2650, 3554, 2983, 3403, 3214, 3163, 2541, 3090, 3097, 3462, 2941, 3486, 2842, 3558, 3104, 3037, 3419, 2780, 2931, 1276, 2928, 2609, 3068, 3128, 2548, 2538, 2618, 2789, 3228, 2657, 3189, 2863, 3307, 3300, 2546, 3048, 3543, 2946, 2975, 3346, 3067, 2728, 2955, 3408, 3027, 3094, 3203, 2988, 2751, 2953, 2566, 2578, 2823, 3063, 3335, 3000, 3181, 3011, 3138, 3389, 2805, 3074, 2894, 3149, 2560, 3417, 3265, 3378, 2901, 2837, 2822, 2745, 3473, 3530, 3040, 2597, 3509, 3522, 3161, 2926, 3209, 3105, 3400, 2630, 2905, 2671, 2818, 2806, 2702, 2709, 3549, 3538, 2534, 2773, 2623, 3491, 3243, 3136, 2693, 3164, 3343, 2918, 2555, 2794, 2679, 3510, 3110, 2672, 3442, 2929, 3184, 3488, 3414, 3093, 2996, 3141, 3544, 3102, 2856, 2957, 3466, 3461, 2788, 2660, 3344, 3204, 2720, 3379, 2826, 2785, 3249, 3527, 3352, 2569, 4457, 2011, 3906, 1533, 1755, 1888, 4248, 1557, 3804, 1363, 1934, 1602, 3337, 3533, 2629, 3038, 2539, 3567, 3291, 3348, 3115, 3359, 2993, 3079, 3506, 2527, 2963, 2938, 2516, 3113, 1345, 2639, 3143, 3044, 2747, 3154, 3280, 3039, 2743, 2902, 3056, 2554, 2522, 3103, 3210, 3434, 2656, 4251, 4166, 4196, 3206, 3328, 2588, 3553, 2714, 3078, 3222, 3137, 3357, 2717, 2944, 3012, 3220, 3202, 2811, 3083, 3269, 3566, 2699, 2515, 3023, 2533, 3288, 3075, 3005, 2685, 3058, 2976, 2622, 3333, 3463, 2939, 3521, 3268, 3117, 2626, 2616, 3240, 2570, 3565, 2919, 3157, 2849, 3444, 2631, 3420, 2659, 3325, 3186, 2920, 3258, 3440, 3457, 3310, 2761, 3134, 2621, 3531, 2711, 2774, 2867, 2585, 3155, 2620, 3156, 2844, 3126, 3160, 2909, 3542, 3225, 2887, 3474, 3218, 2744, 2896, 3135, 3424, 3498, 3529, 2661, 2667, 2549, 2819, 2768, 2935, 3182, 2772, 3230, 3043, 2922, 3581, 3524, 2869, 2610, 3298, 2775, 3108, 2603, 3614, 2612, 2860, 3187, 3238, 3786, 3016, 3436, 2876, 2987, 3532, 3438, 3561, 3259, 2663, 2890, 3433, 3071, 3018, 2580, 2755, 3015, 2540, 3398, 2664, 2583, 2830, 2644, 2641, 3513, 2725, 2723, 3338, 3556, 2866, 2514, 2932, 2753, 2862, 2899, 2605, 2989, 3096, 3124, 2985, 2716, 3145, 3017, 2591, 2640, 3033, 1853, 3216, 3316, 3412, 2971, 3256, 3153, 3575, 3339, 2915, 2531, 3552, 3475, 3060, 3375, 2756, 3382, 2847, 2859, 3251, 3702, 3423, 2537, 2801, 3076, 2696, 3092, 3459, 3144, 3441, 2802, 3479, 2907, 3512, 3518, 3021, 2871, 3032, 2647, 2945, 3045, 2763, 3313, 3034, 3315, 3541, 2746, 2669, 2524, 3003, 2732, 3166, 3046, 3306, 2873, 3364, 3253, 3215, 3061, 2804, 2722, 2964, 2990, 2836, 4098, 4449, 3173, 2762, 3737, 2628, 3507, 2564, 3031, 2872, 3360, 2658, 2930, 2904, 3244, 3217, 3311, 3445, 2840, 3372, 2958, 3098, 3356, 3456, 3388, 2624, 3207, 2576, 2742, 2665, 2815, 3052, 3421, 2593, 3242, 2535, 2966, 2898, 2858, 2943, 2668, 2798, 3196, 2528, 2713, 3001, 2691, 2948, 2767, 2544, 3302, 2734, 2893, 2592, 2861, 3502, 2969, 2582, 3229, 2676, 2545, 3255, 3330, 2547, 3257, 2882, 3151, 3088, 2883, 3318, 2645, 2733, 2587, 3500, 3008, 2715, 2845, 3183, 2654, 3233, 3267, 2741, 2827, 2704, 3091, 2832, 2736, 3177, 3271, 2835, 2908, 3176, 2947, 3292, 3191, 2517, 3026, 3082, 3392, 3381, 2584, 2712, 3213, 3451, 2634, 3150, 2810, 3303, 2573, 3460, 2615, 3394, 2828, 3329, 4377, 4499, 3555, 2974, 3782, 3629, 3578, 3885, 2817, 3248, 2954, 3334, 3571, 3345, 3551, 3384, 3422, 1357, 1844, 2530, 1852, 3449, 3185, 3399, 2786, 3055, 3472, 3397, 2601, 3564, 3277, 4373, 3548, 3179, 3407, 3841, 3347, 3142, 4255, 4431, 3241, 3077, 2700, 3147, 2648, 3283, 2829, 3278, 2581, 2536, 4363, 2848, 3410, 2797, 2523, 2520, 2721, 3496, 2571, 3198, 3219, 3030, 2673, 2921, 3837, 3301, 3322, 2705, 3239, 2949, 3369, 3396, 2892, 2897, 2766, 3174, 3297, 2550, 2889, 2933, 2793, 2627, 2677, 3119, 2596, 3226, 3172, 3089, 2868, 2839, 3942, 3120, 3286, 2843, 3465, 1564, 3946, 4222, 1504, 3999, 2682, 1875, 3539, 3168, 2864, 3308, 3557, 2940, 3109, 3503, 2625, 3455, 3114, 2595, 3331, 2978, 2518, 2521, 4079, 3024, 3573, 2952, 2653, 1769, 3180, 2813, 2652, 2600, 2816, 3201, 3188, 3270, 2997, 2992, 3009, 3520, 2936, 3275, 3165, 3447, 3131, 3305, 2809, 2792, 2729, 2814, 2619, 3266, 2825, 3066, 2857, 2998, 3064, 2681, 3035, 3279, 2764, 3480, 3127, 2912, 3010, 2607, 3211, 3111, 3041, 1573, 3909, 4269, 3487, 3489, 2980, 3428, 3435, 3482, 3020, 2748, 2646, 2787, 2760, 2563, 3085, 3133, 3158, 3170, 2703, 3494, 2556, 2552, 3395, 3245, 3404, 2675, 2791, 1911, 1935, 2749, 3341, 3355, 2575, 2942, 2886, 2758, 2594, 3495, 2884, 3516, 3042, 2737, 2923, 3563, 2855, 3476, 2611, 2937, 3383, 3497, 3402, 2662, 2875, 3223, 2878, 3285, 2757, 3057, 2951, 3519, 2579, 2853, 3387, 3401, 3493, 3393, 1608, 3365, 2885, 3574, 3081, 3007, 3568, 3152, 3367, 3358, 3468, 3290, 3550, 3132, 2726, 2879, 3190, 3309, 2613, 2765, 3454, 2851, 2881, 3232, 3458, 3326, 3353, 2927, 3212, 2950, 3376, 3208, 3062, 3612, 3195, 3385, 2686, 2602, 3569, 3123, 2727, 2821, 2636, 2750, 2850, 3050, 2925, 3336, 3540, 2689, 3139, 2526, 3361, 3022, 3427, 3107, 3140, 3371, 3276, 2831, 3501, 2924, 3366, 3199, 3101, 3321, 3499, 2917, 2683, 2800, 2812, 3340, 3227, 3148, 3657, 4446, 1746, 2666, 3246, 3130, 3560, 3236, 2730, 3572, 1607, 3689, 2968, 1457, 1500, 1184, 3450, 2577, 2567, 2532, 3415, 2934, 2984, 2568, 4147, 3002, 2986, 910, 2979, 2542, 4472, 1472, 4057, 4507, 1711, 913, 916, 1594, 4440, 343, 918, 345, 348, 350, 1518, 3728, 3637, 3570, 3429, 2870, 2995, 4338, 3205, 2880, 3261, 1994, 3968, 4291, 4204, 4071, 352, 2820, 3912, 3287, 1218, 1190, 4145, 353, 355, 1782, 928, 3610, 358, 4224, 1918, 1959, 1840, 3736, 4155, 1543, 4049, 1633, 1495, 372, 1873, 1726, 1748, 4411, 4506, 4270, 4156, 3780, 4036, 4030, 4016, 1550, 3899, 1247, 1244, 4140, 3930, 4117, 4189, 4001, 3799, 3643, 3619, 4149, 1313, 3709, 1727, 3893, 1280, 3622, 1784, 3834, 1752, 3979, 4461, 4113, 3817, 4232, 3902, 1857, 1904, 1481, 1516, 3820, 3789, 4252, 4047, 4330, 4082, 4094, 3785, 3687, 4318, 4243, 3866, 1621, 4315, 1192, 1513, 1856, 3324, 2769, 2678, 3296, 375, 1395, 1584, 4093, 3940, 3778, 4374, 4210, 4009, 4264, 4368, 1610, 4194, 4474, 4013, 4266, 1759, 1922, 3663, 1642, 1185, 4356, 3932, 1233, 4212, 3858, 1198, 4192, 3790, 3712, 1969, 934, 1790, 1663, 1336, 3894, 1554, 1494, 1405, 3576, 4314, 3695, 3845, 4511, 3656, 1406, 1596, 4504, 1359, 1734, 3650, 1305, 1208, 1988, 4451, 1282, 4380, 1658, 1452, 1687, 3791, 4491, 4323, 4014, 1304, 1440, 4422, 3861, 1383, 3644, 3691, 4259, 1749, 4216, 1924, 1421, 1387, 3992, 4423, 4253, 1618, 1871, 1256, 3748, 1297, 1586, 1251, 1299, 1954, 3655, 3886, 4278, 4383, 4485, 1392, 3751, 3931, 3986, 3678, 1249, 4353, 4208, 3710, 4238, 4213, 3969, 4436, 3175, 4128, 2970, 1228, 3534, 3437, 3406, 3641, 3639, 3954, 4335, 3995, 3582, 4475, 3784, 4470, 4010, 3802, 3941, 4427, 4396, 4348, 3587, 3818, 3864, 3956, 3863, 3731, 3814, 4067, 4354, 3014, 4462, 4246, 4190, 4312, 4023, 3760, 3753, 1178, 3884, 2783, 4038, 3545, 2916, 3112, 2834, 3880, 3673, 4102, 4399, 4048, 3752, 4207, 1235, 3943, 4355, 4087, 4100, 4327, 4037, 4163, 3918, 4486, 1243, 3933, 4178, 3627, 3777, 1371, 3685, 1325, 1940, 4482, 4258, 3812, 1581, 1217, 3692, 4430, 3764, 4316, 4285, 3645, 3971, 4421, 1172, 4026, 2740, 3125, 3546, 1725, 1206, 3842, 4404, 3690, 3962, 4513, 4340, 4329, 4410, 3703, 4153, 2707, 3730, 4426, 4180, 4041, 3923, 4444, 3851, 4429, 4361, 1441, 4394, 4302, 3758, 4510, 3742, 1666, 1407, 4187, 1188, 1724, 1646, 4280, 1613, 4006, 1984, 1351, 3653, 3833, 2561, 4442, 3900, 4298, 1203, 4441, 3628, 3725, 937, 4447, 3776, 3658, 4064, 1324, 1367, 3594, 3680, 1300, 1987, 1862, 3998, 1380, 4185, 3686, 3696, 4463, 1350, 4008, 4230, 3853, 4244, 4083, 1546, 3613, 3273, 3452, 3525, 4105, 3835, 1263, 4020, 4144, 1224, 1199, 3667, 2778, 4412, 4407, 1812, 1810, 3823, 1416, 4333, 3146, 4281, 4211, 1979, 1456, 1239, 4167, 3740, 1876, 1388, 1967, 1474, 1471, 4176, 1232, 1989, 4125, 1741, 3585, 1174, 1396, 4061, 4015, 1207, 3698, 3825, 3922, 4021, 4181, 1598, 1916, 1429, 4502, 4231, 1321, 4390, 3693, 3734, 3635, 1768, 4025, 3976, 3840, 3963, 4286, 1502, 3836, 4161, 3659, 3743, 4130, 3605, 1385, 1783, 4392, 3826, 1473, 1883, 1834, 3984, 4495, 3910, 4160, 3671, 4184, 4132, 4250, 1503, 1237, 1523, 1417, 4063, 1562, 3977, 1971, 1707, 3769, 4074, 1534, 4239, 4003, 3915, 1689, 1776, 1410, 1823, 1498, 1329, 386, 3936, 4054, 4260, 4359, 4131, 4297, 4357, 4022, 3770, 4046, 1222, 3953, 4228, 4226, 4277, 1520, 1767, 1466, 1194, 4137, 1908, 1927, 1758, 3772, 3661, 4186, 4174, 1170, 1859, 4183, 1408, 1403, 941, 4033, 3623, 1826, 3719, 1931, 3584, 4004, 3591, 3967, 4168, 3957, 3878, 4165, 4191, 3980, 4058, 4200, 4336, 4322, 3991, 4106, 1641, 1570, 3978, 4154, 1365, 4257, 3846, 4345, 4379, 3603, 1693, 3937, 3801, 4201, 1898, 1845, 1226, 1220, 3745, 3988, 3975, 4236, 4075, 4146, 4256, 4308, 4000, 4148, 3588, 3868, 4403, 3883, 4326, 4393, 3895, 4237, 3955, 3727, 4005, 4489, 3982, 4437, 3597, 4342, 3872, 3987, 4490, 3876, 3668, 4300, 4042, 3648, 3996, 3800, 4367, 4099, 1807, 3887, 4428, 1884, 1682, 4364, 4306, 3869, 3600, 3914, 1968, 1670, 3811, 1865, 3961, 1506, 4221, 1376, 1379, 3768, 4225, 945, 394, 1714, 1422, 3618, 4433, 1965, 4471, 954, 4139, 1482, 3721, 1825, 1698, 1519, 1352, 4202, 4409, 1977, 1917, 405, 406, 3889, 413, 962, 418, 3675, 3974, 964, 420, 967, 968, 1897, 1272, 4133, 425, 4141, 430, 3749, 4044, 3590, 1944, 4126, 977, 4400, 1606, 980, 2604, 2895, 3448, 4563, 1692, 4055, 4358, 1664, 4309, 4045, 3854, 3682, 2688, 4366, 3425, 3231, 3649, 2759, 2724, 3873, 3755, 1216, 2754, 2606, 3471, 3234, 2565, 2803, 2562, 2684, 3411, 3405, 2690, 1255, 3985, 3535, 1306, 4084, 3282, 447, 1353, 1780, 449, 1485, 453, 1728, 454, 1696, 455, 3116, 1869, 457, 1386, 3879, 2698, 459, 1447, 4425, 1645, 467, 1488, 478, 1604, 1011, 4313, 4073, 4274, 1775, 2000, 2480, 1882, 1817, 1880, 1800, 4473, 3783, 3870, 1948, 3699, 1735, 3792, 4290, 492, 4090, 1019, 1803, 3642, 497, 500, 1333, 1890, 1024, 3608, 1864, 1531, 3636, 1699, 1028, 1366, 1030, 4027, 3478, 3763, 2959, 1293, 517, 3197, 1595, 3413, 2238, 1031, 1448, 1032, 1675, 1797, 3759, 1215, 4122, 3966, 528, 3911, 3289, 1821, 1874, 1037, 536, 1039, 3767, 3683, 540, 541, 1338, 1616, 1901, 1517, 2719, 3803, 4123, 4233, 3129, 3087, 3505, 4158, 1044, 3720, 4351, 4414, 1673, 3453, 3254, 1649, 543, 4240, 3580, 2598, 4062, 2841, 1049, 3515, 1433, 1323, 4301, 1051, 3738, 1270, 3857, 1056, 3662, 1057, 3981, 1063, 568, 570, 3620, 1064, 4002, 3964, 3707, 3666, 1348, 4273, 4497, 1401, 4438, 1895, 1912, 3939, 4170, 4056, 1221, 1654, 1067, 3934, 4080, 4352, 574, 3739, 1565, 3950, 1397, 3716, 1569, 1465, 4268, 1183, 3726, 3881, 4134, 4347, 4012, 3938, 4066, 4198, 4416, 4164, 3630, 4325, 4375, 4371, 4432, 4215, 1753, 3944, 1409, 4195, 4455, 4512, 3750, 3633, 4070, 4104, 4162, 4235, 4346, 1572, 4443, 3761, 1346, 3592, 1891, 4469, 1275, 577, 1963, 4129, 1296, 1360, 3733, 4111, 3993, 4108, 3949, 1556, 1435, 1424, 1830, 1197, 1254, 4120, 1545, 4417, 1469, 1292, 4293, 1827, 3839, 3983, 4395, 4295, 3715, 3855, 3609, 4076, 4175, 3927, 1650, 4299, 1773, 2004, 1267, 1364, 4007, 3729, 3665, 3722, 1712, 1751, 3924, 3952, 1343, 4114, 1704, 4448, 1786, 3354, 586, 3432, 2891, 587, 1903, 2077, 1080, 1563, 2274, 595, 2559, 2590, 2738, 4478, 4069, 1327, 4150, 3260, 3481, 3672, 3625, 2008, 4439, 3852, 3997, 1411, 1268, 4050, 3377, 4424, 1496, 4143, 4493, 3492, 1962, 1412, 4017, 4477, 1794, 4263, 3072, 2199, 3888, 604, 605, 1368, 3827, 4103, 607, 1571, 1438, 3701, 4389, 4897, 1603, 2154, 1715, 4369, 1652, 1733, 4218, 1798, 621, 1667, 1384, 3700, 1788, 1600, 1102, 1423, 2771, 1339, 3070, 2557, 2795, 2906, 3299, 3118, 4779, 2028, 1614, 1947, 630, 4479, 3766, 1106, 634, 1108, 635, 638, 3706, 3735, 3390, 3431, 2838, 3483, 3464, 3848, 2558, 3314, 3086, 3029, 2956, 3517, 2651, 2914, 2680, 2632, 3121, 3100, 3528, 3526, 3084, 4220, 3304, 2846, 3235, 2903, 3559, 2687, 3409, 3237, 2900, 2999, 3349, 3171, 2752, 3262, 3504, 3047, 4376, 3193, 3430, 2525, 2670, 2911, 3508, 2776, 2697, 3200, 2790, 3323, 2543, 2874, 2614, 3904, 3373, 3054, 2617, 4242, 3621, 2708, 4179, 1269, 3095, 1286, 3624, 4481, 3511, 2735, 4381, 3295, 1585, 3221, 2643, 2739, 3920, 1801, 4279, 2502, 1117, 2965, 2695, 3293, 3264, 2076, 657, 2910, 3391, 2808, 3099, 2913, 3676, 2852, 3284, 2731, 1609, 3537, 3994, 1319, 4467, 1802, 1227, 1623, 667, 1133, 1134, 673, 1933, 1731, 1793, 3342, 683, 1146, 687, 3822, 1601, 692, 3905, 1414, 696, 1695, 4115, 701, 1544, 702, 703, 4031, 2010, 3810, 4452, 3677, 4227, 4402, 4157, 4197, 1337, 1253, 1532, 1493, 1854, 1510, 705, 1153, 4476, 1375, 712, 1245, 715, 4234, 1154, 1314, 4096, 720, 1311, 721, 722, 4217, 726, 3815, 2005, 1964, 1262, 4480, 4294, 1582, 3439, 2833, 4287, 4509, 3272, 4112, 2967, 3651, 1991, 1805, 1628, 3705, 1195, 3859, 3807, 4307, 1454, or 1781.

[0209] A VP capsid polypeptide may have a 581 to 589 region having a sequence of SEQ ID NO: 5014, wherein X⁵ of SEQ ID NO: 5014 is K or R. In some embodiments, the 581 to 589 region has a sequence of any one of SEQ ID NOs: 2498, 4177, 742, 16, 17, 18, 745, 3477, 1548, 2982, 3426, 3073, 3169, 747, 3362, 4942, 23, 28, 2038, 3660, 750, 31, 32, 1640, 34, 37, 4925, 1205, 4288, 4053, 3263, 2553, 3947, 2710, 2608, 3467, 2796, 2961, 2529, 3320, 2674, 2635, 3446, 3053, 3688, 4320, 3708, 2807, 3562, 3274, 3374, 3013, 3416, 2981, 3065, 2777, 3469, 2977, 2638, 2972, 3059, 2574, 3380, 4262, 3167, 3368, 1225, 3178, 3006, 3252, 2991, 2642, 2519, 3363, 2633, 42, 755, 44, 756, 46, 1952, 758, 2410, 2551, 3718, 1308, 1230, 3960, 1378, 2589, 3681, 760, 53, 4951, 4591, 762, 3925, 55, 3654, 763, 60, 61, 4086, 1740, 766, 1966, 63, 2041, 64, 769, 770, 2384, 771, 65, 772, 2197, 68, 3816, 69, 2599, 70, 3865, 1549, 3882, 75, 4501, 76, 774, 1413, 776, 3757, 3593, 4043, 4397, 4415, 3754, 1470, 4360, 3945, 2854, 3523, 3669, 1356, 81, 82, 4065, 83, 84, 1294, 87, 3891, 4456, 4040, 1189, 1490, 90, 92, 782, 94, 1831, 1867, 4458, 1936, 100, 792, 2007, 4556, 795, 104, 106, 1849, 2509, 110, 1906, 798, 2359, 2461, 4864, 1344, 116, 120, 121, 803, 1463, 805, 1760, 123, 124, 806, 127, 2085, 130, 132, 809, 1978, 134, 813, 139, 815, 1326, 141, 142, 145, 4816, 1302, 817, 146, 818, 148, 149, 4546, 150, 153, 156, 157, 163, 164, 166, 169, 823, 824, 1483, 175, 177, 178, 179, 826, 827, 182, 183, 829, 184, 185, 190, 191, 192, 2361, 195, 1391, 197, 2223, 201, 202, 4775, 1334, 837, 3901, 3312, 212, 4386, 3028, 213, 1446, 214, 215, 1896, 3490, 217, 219, 223, 225, 2088, 4542, 226, 227, 230, 843, 844, 237, 845, 239, 849, 852, 1536, 854, 244, 245, 248, 855, 251, 253, 255, 257, 858, 860, 262, 863, 4535, 865, 264, 1241, 265, 1477, 267, 867, 1252, 273, 275, 1980, 277, 281, 1892, 879, 1539, 881, 1295, 282, 285, 1626, 2082, 1374, 1620, 4564, 289, 887, 888, 889, 4324, 293, 4138, 296, 3903, 892, 3829, 298, 301, 302, 1589, 4370, 2342, 309, 4059, 310, 1779, 1558, 1552, 317, 320, 898, 321, 2016, 2134, 324, 325, 327, 1635, 4484, 1756, 4609, 332, 4635, 3069, 2637, 3025, 2782, 3247, 3350, 2692, 2586, 3214, 3163, 2541, 3090, 3097, 3462, 3037, 3419, 2780, 2931, 1276, 2789, 3228, 2657, 3189, 2975, 3346, 3067, 2728, 2955, 3408, 3027, 3094, 3203, 2988, 2751, 2953, 2566, 2578, 2901, 2837, 2822, 2745, 3473, 3530, 3040, 2597, 3509, 3522, 3161, 2926, 3209, 3105, 3400, 2630, 2905, 2671, 2818, 2806, 2534, 2773, 2623, 3491, 3243, 3136, 2693, 3164, 2679, 3510, 3110, 2672, 3442, 2929, 3184, 3488, 3102, 3466, 3461, 2788, 2660, 3344, 2720, 3379, 2826, 3249, 3527, 4460, 3352, 4319, 3906, 4248, 3804, 1363, 1404, 4349, 4166, 4196, 3206, 3328, 2588, 3553, 2714, 3078, 3222, 3137, 3357, 2717, 2944, 3012, 3220, 3202, 2811, 3083, 3269, 3566, 2699, 2515, 3023, 2533, 3288, 3075, 3005, 2685, 3058, 2976, 2622, 3333, 3463, 2939, 3521, 3268, 3117, 2626, 2616, 3240, 2570, 3565, 2919, 3157, 2849, 3444, 2631, 3420, 2659, 3325, 3186, 2920, 3258, 3440, 3457, 3310, 2761, 3134, 2621, 3531, 2711, 2774, 2867, 2585, 3155, 2620, 3156, 2844, 3126, 3160, 2909, 3542, 3225, 2887, 3474, 3218, 2744, 2896, 3135, 3424, 3498, 3529, 2661, 2667, 2549, 2819, 2768, 2935, 3182, 3092, 3459, 3144, 3441, 2802, 3479, 2907, 3512, 3518, 3021, 2871, 3032, 2647, 2945, 3045, 2763, 3313, 3034, 3315, 3541, 2746, 2669, 2524, 3003, 2732, 3166, 3046, 3306, 2873, 3364, 3253, 3215, 3061, 2804, 2722, 2964, 2990, 2836, 4098, 4449, 3173, 2762, 3737, 2628, 3507, 2564, 3031, 2872, 3360, 2658, 2930, 2904, 3244, 3217, 3311, 3445, 2840, 3372, 2958, 3098, 3356, 3456, 3388, 2624, 3207, 2576, 2742, 2665, 2815, 3052, 3421, 2593, 3242, 2535, 2966, 2898, 2858, 2943, 2668, 2798, 3196, 2528, 2713, 3001, 2691, 2948, 2767, 2544, 3302, 2734, 2893, 2592, 2861, 3502, 2969, 2582, 3229, 2676, 2545, 3255, 3330, 2547, 3257, 2882, 3151, 3088, 2883, 3318, 2645, 2733, 2587, 3500, 3008, 2715, 2845, 3183, 2654, 3233, 3267, 2741, 2827, 2704, 3091, 2832, 2736, 3177, 3271, 2835, 2908, 3176, 2947, 3292, 3191, 2517, 3026, 3082, 3392, 3782, 3629, 3578, 3885, 4081, 1764, 1852, 4431, 3241, 3077, 2700, 3147, 2648, 3283, 2829, 3278, 2581, 2536, 4363, 2848, 3410, 2797, 2523, 2520, 2721, 3496, 2571, 3198, 3219, 3030, 2673, 2921, 3837, 3301, 3322, 2705, 3239, 2949, 3369, 3396, 2892, 2897, 2766, 3174, 3297, 2550, 2889, 2933, 2793, 2627, 2677, 3119, 2596, 3226, 3172, 3089, 2868, 2839, 3942, 4222, 1504, 3180, 2813, 2652, 2600, 2816, 3201, 3188, 3270, 2997, 2992, 3009, 3520, 2936, 3275, 3165, 3447, 3131, 3305, 2809, 2792, 2729, 2814, 2619, 3266, 2825, 3066, 2857, 2998, 3064, 2681, 3035, 3279, 2764, 3480, 3127, 2912, 3010, 2607, 3211, 3111, 3909, 4269, 3019, 1415, 3020, 2748, 2646, 2787, 2760, 3158, 3170, 2703, 3494, 3404, 2675, 2749, 3341, 3355, 2594, 3495, 2884, 3516, 3042, 2737, 2923, 3563, 2855, 3476, 2611, 2937, 3383, 2875, 3223, 2878, 1808, 2951, 3519, 2579, 2853, 3387, 3401, 3007, 3568, 3152, 3367, 3358, 336, 3290, 3550, 3309, 2613, 2765, 1355, 2881, 3232, 3458, 3326, 3353, 2927, 3212, 2950, 3376, 3208, 3062, 3612, 3195, 3385, 2686, 1622, 3361, 3022, 3427, 3107, 3140, 3371, 3276, 2831, 3501, 2924, 3366, 3199, 3101, 3321, 3499, 2917, 2683, 1464, 3560, 3236, 2730, 3572, 1607, 909, 2577, 2567, 2532, 3415, 2934, 2984, 2568, 3002, 2338, 4472, 1472, 1529, 4507, 1583, 340, 912, 2013, 913, 2277, 1594, 4440, 917, 343, 344, 345, 346, 350, 351, 4498, 3637, 3570, 3429, 4091, 4338, 3205, 2880, 3261, 3968, 4291, 4204, 4034, 2820, 3912, 3287, 1218, 1190, 4145, 354, 3610, 4224, 1840, 3736, 1770, 4155, 932, 363, 1279, 2156, 1722, 368, 1566, 370, 4967, 372, 1211, 2494, 1726, 1748, 1191, 4039, 4411, 4506, 4270, 4156, 3780, 1550, 3899, 1181, 3919, 1639, 3664, 4189, 4001, 3799, 1240, 1686, 1479, 1307, 1575, 4296, 1665, 3871, 1605, 4408, 4149, 3741, 3893, 1280, 1983, 3979, 3817, 1489, 4214, 3902, 1857, 1904, 3820, 3789, 4252, 4330, 4082, 3785, 3687, 4243, 3704, 4172, 4315, 1192, 2769, 2678, 3296, 2343, 4093, 4453, 3940, 3778, 4374, 4339, 4368, 4194, 4474, 4013, 1771, 1759, 3860, 3832, 1381, 4356, 1233, 4212, 3858, 1198, 3611, 1919, 1819, 3790, 1969, 4247, 1790, 3894, 1554, 3576, 4314, 1851, 1850, 4511, 3656, 3638, 1406, 1443, 1661, 4504, 3831, 4435, 1208, 1988, 3849, 1835, 4380, 4024, 4491, 4323, 4014, 1511, 1981, 1676, 1547, 1383, 3644, 3691, 4259, 1176, 4216, 1924, 1387, 4423, 1256, 4119, 1251, 3990, 4029, 4097, 3890, 3796, 4343, 1202, 4413, 4384, 3808, 3892, 3926, 3756, 4405, 4109, 1210, 4492, 3969, 4436, 3175, 4128, 2970, 1228, 3534, 3437, 3784, 4470, 4010, 4334, 3821, 4171, 3824, 3631, 4494, 1320, 1204, 1223, 1284, 1685, 3760, 3753, 1178, 3884, 2783, 4038, 3545, 2916, 3112, 2834, 3880, 3673, 4102, 4100, 4327, 3634, 3617, 4445, 4303, 1370, 3838, 1187, 3615, 3746, 3935, 1941, 4419, 1171, 3670, 3777, 936, 3685, 1325, 1940, 4482, 4258, 3812, 4124, 4508, 4500, 3652, 3972, 1630, 4421, 1172, 4026, 2740, 3125, 3546, 4513, 4340, 1763, 1487, 3589, 3907, 4041, 3851, 4077, 4187, 1193, 1196, 1724, 1717, 1200, 1975, 1613, 4006, 3653, 3833, 1593, 4442, 3900, 4388, 1820, 4317, 4249, 3628, 3794, 4447, 3776, 3658, 1377, 4011, 4272, 3594, 4185, 3686, 3696, 1350, 4230, 3853, 4244, 1909, 3897, 1546, 3273, 3452, 3525, 4105, 3835, 383, 1263, 1492, 3856, 3586, 1175, 4144, 1224, 1199, 3667, 2778, 4412, 1507, 3146, 4281, 1179, 3843, 3740, 1388, 1474, 1342, 1471, 4176, 1741, 1508, 4378, 1212, 4015, 1207, 3698, 3825, 4231, 3806, 3896, 3963, 4286, 3743, 4130, 3605, 4173, 4265, 1246, 1737, 3826, 1473, 1992, 1883, 1656, 3671, 4063, 1847, 4239, 3915, 1265, 1498, 1329, 3874, 4261, 1791, 3579, 4359, 4131, 4297, 4357, 4046, 3788, 4169, 1925, 4228, 4101, 1889, 1369, 4088, 4019, 1194, 3772, 3850, 1315, 1530, 1859, 4183, 1408, 4033, 3623, 1928, 1459, 1765, 4004, 3591, 3967, 4168, 3957, 3878, 3980, 3958, 4051, 3798, 4032, 3991, 4106, 1641, 4464, 3813, 4257, 3846, 4345, 1787, 1214, 4483, 4201, 1220, 3867, 3640, 3916, 1209, 4236, 4075, 4146, 4256, 4308, 4000, 4148, 3588, 3883, 4326, 4092, 4283, 1553, 3805, 4151, 1281, 1681, 4489, 3982, 4437, 3597, 4342, 3987, 3583, 3647, 389, 4304, 3793, 1937, 3996, 3800, 4367, 4099, 1390, 4364, 4306, 1278, 1672, 1542, 1915, 3600, 3948, 3811, 1362, 4276, 1445, 1721, 1632, 3607, 1317, 1778, 1668, 391, 4406, 4341, 1480, 393, 394, 395, 946, 3618, 4433, 1177, 947, 950, 400, 4471, 401, 402, 954, 3602, 4434, 3721, 1825, 4202, 4409, 406, 1631, 1684, 3889, 410, 412, 2352, 1905, 417, 418, 3675, 1833, 3974, 419, 964, 420, 421, 969, 4733, 1272, 971, 423, 3830, 973, 426, 1708, 428, 4141, 3749, 1619, 975, 4044, 3590, 1706, 4400, 979, 2895, 3448, 438, 982, 2433, 983, 442, 3862, 2435, 443, 4309, 4045, 3854, 3682, 444, 445, 4366, 3425, 3231, 3649, 2759, 2724, 3873, 3599, 3775, 3471, 3234, 2565, 2803, 2562, 2684, 3411, 3405, 2690, 3694, 446, 3985, 3535, 4084, 3282, 988, 2107, 990, 451, 452, 453, 992, 993, 1696, 996, 3116, 1386, 999, 458, 3879, 460, 461, 462, 2339, 1003, 4425, 1645, 1004, 466, 2328, 468, 1231, 1468, 2496, 473, 474, 2108, 1273, 1007, 1744, 1659, 478, 1009, 1012, 4313, 482, 1499, 484, 2513, 2205, 4592, 1458, 4274, 2122, 4905, 4205, 2000, 488, 1894, 3917, 3616, 4311, 4085, 4401, 1310, 3783, 1538, 3870, 1948, 3699, 1735, 3792, 2202, 4090, 2378, 2012, 3642, 1020, 2302, 4665, 4781, 500, 1022, 1023, 4686, 505, 507, 508, 509, 1025, 1732, 1816, 3636, 1028, 516, 1366, 4572, 2489, 1261, 4027, 3763, 2959, 1293, 3197, 1448, 1032, 519, 2420, 522, 3759, 1215, 4122, 1730, 524, 526, 3966, 1035, 527, 528, 529, 530, 531, 1036, 532, 533, 536, 537, 3767, 1929, 1041, 3683, 1043, 4906, 542, 1338, 1796, 4331, 4332, 4466, 3803, 3087, 3505, 1449, 1044, 4414, 3453, 3254, 544, 546, 1045, 547, 4240, 3580, 4680, 549, 550, 2598, 551, 3819, 1259, 4062, 554, 1049, 1050, 1433, 555, 1052, 1053, 3738, 3857, 2089, 1056, 2193, 1257, 1238, 3662, 1059, 1060, 4203, 3981, 1303, 4116, 567, 569, 3620, 4002, 3679, 3707, 4497, 4438, 1264, 3939, 4170, 4056, 1271, 1451, 1654, 3934, 4080, 4352, 574, 3739, 1565, 1419, 3950, 3716, 1465, 3726, 3881, 4134, 4347, 4012, 3938, 4066, 4164, 3630, 4229, 4292, 4215, 1729, 4223, 4455, 4512, 3633, 4070, 4104, 4162, 4443, 3761, 1587, 3592, 1891, 4469, 1963, 4129, 1360, 3949, 1861, 4120, 1292, 4293, 3839, 3983, 3928, 4295, 3715, 3855, 3609, 1990, 4007, 3722, 1624, 3924, 3952, 580, 2003, 1343, 582, 4114, 1818, 1704, 4448, 584, 1078, 1786, 585, 1832, 586, 2891, 587, 4936, 1082, 4459, 2113, 590, 2308, 593, 1858, 597, 2738, 4150, 3260, 3481, 4439, 1268, 4050, 3377, 4424, 3492, 1412, 4477, 4263, 3072, 2009, 3888, 3827, 4103, 1438, 609, 610, 611, 3701, 4389, 613, 4369, 617, 1921, 1373, 1870, 4218, 1099, 1702, 4801, 623, 3700, 1788, 625, 4878, 1423, 1339, 3875, 628, 2557, 2906, 2029, 4876, 1103, 631, 4479, 3766, 632, 1104, 1105, 634, 4651, 1108, 1813, 636, 638, 641, 4581, 1112, 2164, 3735, 3390, 2558, 3314, 3086, 3029, 2956, 3517, 2651, 2914, 2680, 2632, 3121, 3100, 3528, 3526, 3084, 4220, 2752, 3262, 3504, 3047, 4376, 3193, 3430, 2525, 2670, 2911, 3508, 2776, 2697, 3200, 2790, 3323, 2543, 2874, 2614, 3904, 3373, 3054, 2617, 4242, 3621, 4398, 1269, 3624, 4481, 1432, 3295, 1568, 1766, 2643, 2739, 4760, 1115, 3920, 644, 645, 646, 4279, 3762, 1637, 1509, 2200, 1117, 4780, 2965, 2695, 650, 651, 653, 654, 655, 658, 4035, 2910, 3391, 2808, 3676, 2852, 3284, 3537, 1319, 4467, 1802, 1227, 660, 4812, 2364, 1124, 1125, 665, 4917, 1127, 1129, 1132, 1133, 2236, 673, 4557, 1136, 1139, 678, 4737, 4531, 679, 680, 1144, 681, 4525, 2415, 685, 2445, 3822, 690, 691, 1601, 4621, 3905, 695, 1149, 696, 2027, 2160, 1795, 1372, 4115, 2194, 1920, 4031, 1393, 1277, 1400, 4402, 4157, 4028, 704, 1902, 1510, 4182, 1153, 4476, 2053, 710, 1375, 715, 4096, 717, 1155, 719, 1311, 722, 4217, 1156, 723, 1157, 1627, 4566, 1158, 724, 725, 1953, 1201, 3787, 3747, 1846, 3815, 1822, 1537, 1318, 4294, 733, 734, 3439, 2833, 4505, 4267, 3697, 4112, 2967, 3651, 1805, 1163, 3859, 2275, 737, 1167, 1745, 3807, or 4307.

[0210] A VP capsid polypeptide may have a 581 to 589 region having a sequence of SEQ ID NO: 5014, wherein X⁶ of SEQ ID NO: 5014 is K or R. In some embodiments, the 581 to 589 region has a sequence of any one of SEQ ID NOs: 738, 4177, 1289, 740, 14, 743, 744, 17, 3477, 1548, 3051, 2982, 2877, 746, 19, 3036, 3426, 3073, 3169, 747, 3362, 2784, 21, 3192, 22, 1638, 748, 24, 749, 27, 1703, 1836, 28, 3660, 29, 750, 1640, 33, 35, 36, 1653, 1205, 3795, 753, 4288, 4219, 2770, 2962, 4241, 4107, 2718, 3317, 4391, 3263, 2553, 3947, 2710, 2608, 3467, 2796, 2961, 2529, 3320, 2674, 2635, 3446, 3053, 3250, 3688, 1998, 4320, 3351, 2655, 3514, 2779, 3194, 3319, 3224, 3281, 3708, 2807, 3562, 3274, 3374, 3013, 3416, 2981, 3065, 2777, 3469, 2977, 2638, 2972, 3059, 2574, 3380, 4262, 3167, 3368, 2781, 3547, 3386, 1225, 2960, 3485, 3370, 3443, 2824, 1467, 3327, 3178, 3006, 3252, 2991, 3470, 2888, 2572, 3418, 2642, 2519, 3363, 40, 2633, 44, 45, 756, 47, 48, 1952, 3122, 2551, 3718, 3484, 3577, 1308, 3960, 1378, 2994, 3080, 2589, 3681, 51, 760, 762, 3925, 3654, 763, 59, 60, 4086, 1740, 1660, 62, 1966, 63, 2438, 768, 66, 67, 68, 3816, 2599, 2706, 72, 73, 74, 3865, 1549, 1361, 3882, 773, 3713, 1942, 1312, 4501, 76, 1413, 775, 1560, 4289, 3757, 3593, 3908, 4397, 4415, 3723, 3754, 4360, 3945, 2854, 3523, 3669, 1356, 4065, 1294, 1484, 85, 86, 3891, 4456, 4040, 4496, 1982, 2001, 1478, 1189, 1490, 1885, 1926, 89, 780, 1180, 92, 781, 782, 783, 786, 94, 95, 788, 1831, 1867, 96, 4458, 97, 1970, 1936, 1590, 98, 99, 789, 790, 1298, 1688, 791, 792, 2007, 102, 103, 104, 105, 107, 108, 1579, 1906, 111, 798, 112, 799, 800, 1444, 801, 114, 115, 1344, 116, 802, 117, 118, 119, 121, 803, 1463, 1760, 806, 126, 128, 807, 129, 131, 808, 133, 1978, 811, 812, 135, 136, 137, 138, 814, 140, 1326, 141, 142, 143, 2344, 816, 1634, 1302, 817, 818, 147, 148, 149, 150, 151, 154, 155, 819, 820, 156, 157, 158, 161, 162, 165, 822, 168, 169, 170, 823, 172, 1651, 173, 1483, 174, 825, 176, 178, 180, 827, 181, 828, 4911, 184, 186, 188, 189, 830, 192, 193, 194, 196, 1391, 198, 199, 200, 201, 202, 203, 205, 832, 206, 834, 207, 208, 209, 210, 835, 836, 1334, 3901, 3312, 2649, 1450, 4386, 3028, 1446, 1522, 3490, 217, 219, 1612, 220, 221, 222, 839, 223, 840, 224, 225, 228, 229, 230, 231, 842, 232, 233, 234, 238, 847, 239, 850, 851, 853, 1536, 240, 241, 242, 243, 244, 245, 247, 250, 251, 254, 255, 857, 256, 258, 259, 859, 260, 861, 862, 864, 263, 2318, 865, 2326, 264, 1241, 266, 1477, 867, 268, 868, 269, 270, 869, 870, 271, 871, 872, 272, 873, 1252, 1591, 875, 274, 275, 276, 876, 877, 277, 278, 280, 1892, 1539, 881, 3601, 3877, 1460, 282, 1799, 284, 1626, 286, 1374, 1620, 1290, 1354, 887, 1956, 889, 292, 4324, 4138, 891, 296, 3903, 297, 3829, 3809, 4271, 3844, 1436, 300, 1617, 1961, 302, 304, 305, 2147, 1589, 4370, 307, 3646, 4059, 1431, 1331, 312, 1779, 313, 896, 1558, 1552, 318, 319, 322, 1958, 323, 324, 901, 1491, 328, 329, 4484, 907, 3536, 2701, 2799, 3332, 3294, 3159, 3069, 2637, 3025, 2782, 3247, 3350, 2692, 2586, 3004, 3049, 2694, 2650, 3554, 2983, 3403, 3214, 3163, 2541, 3090, 3097, 3462, 1430, 2941, 3486, 2842, 3558, 3104, 3037, 3419, 2780, 2931, 1276, 2928, 2609, 3068, 3128, 2548, 2538, 2618, 2789, 3228, 2657, 3189, 2863, 3307, 3300, 2546, 3048, 3543, 2946, 2975, 3346, 3067, 2728, 2955, 3408, 3027, 3094, 3203, 2988, 2751, 2953, 2566, 2578, 2823, 3063, 3335, 3000, 3181, 3011, 3138, 3389, 2805, 3074, 2894, 3149, 2560, 3417, 3265, 3378, 2901, 2837, 2822, 2745, 3473, 3530, 3040, 2597, 3509, 3522, 3161, 2926, 3209, 3105, 3400, 2630, 2905, 2671, 2818, 2806, 2702, 2709, 3549, 3538, 2534, 2773, 2623, 3491, 3243, 3136, 2693, 3164, 3343, 2918, 2555, 2794, 2679, 3510, 3110, 2672, 3442, 2929, 3184, 3488, 3414, 3093, 2996, 3141, 3544, 3102, 2856, 2957, 3466, 3461, 2788, 2660, 3344, 3204, 2720, 3379, 2826, 1789, 2785, 3249, 3527, 4460, 3352, 2569, 4457, 2011, 4319, 3906, 1533, 1755, 4248, 1557, 3804, 1602, 4188, 1330, 4349, 3337, 3533, 2629, 3038, 2539, 3567, 3291, 3348, 3115, 3359, 2993, 3079, 3506, 2527, 2963, 2938, 2516, 3113, 2639, 3143, 3044, 2747, 3154, 3280, 3039, 2743, 2902, 3056, 2554, 2522, 3103, 3210, 3434, 2656, 4251, 2588, 3553, 2714, 3078, 3222, 3137, 3357, 2717, 2944, 3012, 3220, 3202, 2811, 3083, 3269, 3566, 2699, 2515, 3023, 2533, 3288, 3075, 3005, 2685, 3058, 2976, 2622, 3333, 3463, 2939, 3521, 3268, 3117, 2626, 2616, 3240, 2570, 3565, 2919, 3157, 2849, 3444, 2631, 3420, 2659, 3325, 3186, 2920, 3258, 3440, 3457, 3310, 2761, 3134, 2621, 3531, 2711, 2774, 2867, 2585, 3155, 2620, 3156, 2844, 3126, 3160, 2909, 3542, 3225, 2887, 3474, 3218, 2744, 2896, 3135, 3424, 3498, 3529, 2661, 2667, 2549, 2819, 2768, 2935, 3182, 2772, 3230, 3043, 2922, 3581, 2869, 2610, 3298, 2775, 3108, 2603, 2612, 2860, 3187, 3238, 3786, 4385, 3016, 3436, 2876, 2987, 3532, 3438, 3561, 3259, 2663, 2890, 3433, 3071, 3018, 2580, 2755, 3015, 2540, 3398, 2664, 2583, 2830, 2644, 2641, 3513, 2725, 2723, 3338, 3556, 2866, 2514, 2932, 2753, 2862, 2899, 2605, 2989, 3096, 3124, 2985, 2716, 3145, 3017, 2591, 2640, 3033, 3316, 3412, 2971, 3256, 3153, 3575, 3339, 2915, 2531, 3552, 3475, 3060, 3375, 2756, 3382, 2847, 2859, 3251, 3702, 3423, 2537, 2801, 3076, 2696, 3459, 3144, 3441, 2802, 3479, 2907, 3512, 3518, 3021, 2871, 3032, 2647, 2945, 3045, 2763, 3313, 3034, 3315, 3541, 2746, 2669, 2524, 3003, 2732, 3166, 3046, 3306, 2873, 3364, 3253, 3215, 3061, 2804, 2722, 2964, 2990, 2836, 3173, 2762, 3737, 2628, 3507, 2564, 3031, 2872, 3360, 2658, 2930, 2904, 3244, 3217, 3311, 3445, 2840, 3372, 2958, 3098, 3356, 3456, 3388, 2624, 3207, 2576, 2742, 2665, 2815, 3052, 3421, 2593, 3242, 2535, 2966, 2898, 2858, 2943, 2668, 2798, 3196, 2528, 2713, 3001, 2691, 2948, 2767, 2544, 3302, 2734, 2893, 2592, 2861, 3502, 2969, 2582, 3229, 2676, 2545, 3255, 3330, 2547, 3257, 2882, 3151, 3088, 2883, 3318, 2645, 2733, 2587, 3500, 3008, 2715, 2845, 3183, 2654, 3233, 3267, 2741, 2827, 2704, 3091, 2832, 2736, 3177, 3271, 2835, 2908, 3176, 2947, 3292, 3191, 2517, 3026, 3082, 3392, 2584, 2712, 3213, 3451, 2634, 3150, 2810, 3303, 2573, 3460, 2615, 3394, 2828, 3329, 4377, 4499, 3555, 2974, 3629, 3578, 3885, 2817, 3248, 2954, 3334, 3571, 3345, 3551, 3384, 3422, 2530, 2973, 4418, 4081, 3951, 1764, 1671, 1843, 3449, 3185, 3399, 2786, 3055, 3472, 3397, 2601, 3564, 3277, 3548, 3179, 3407, 3841, 3347, 3142, 3241, 3077, 2700, 3147, 2648, 3283, 2829, 3278, 2581, 2536, 4363, 2848, 3410, 2797, 2523, 2520, 2721, 3496, 2571, 3198, 3219, 3030, 2673, 2921, 3301, 3322, 2705, 3239, 2949, 3369, 3396, 2892, 2897, 2766, 3174, 3297, 2550, 2889, 2933, 2793, 2627, 2677, 3119, 2596, 3226, 3172, 3089, 2868, 2839, 3120, 3286, 2843, 3465, 3946, 2682, 2865, 3539, 3168, 2864, 3308, 3557, 2940, 3109, 3503, 2625, 3455, 3114, 2595, 3331, 2978, 2518, 2521, 4079, 3024, 3573, 2952, 2653, 3180, 2813, 2652, 2600, 2816, 3201, 3188, 3270, 2997, 2992, 3009, 3520, 2936, 3275, 3165, 3447, 3131, 3305, 2809, 2792, 2729, 2814, 2619, 3266, 2825, 3066, 2857, 2998, 3064, 2681, 3035, 3279, 2764, 3480, 3127, 2912, 3010, 2607, 3211, 3111, 3041, 4269, 3487, 3489, 3019, 1266, 1415, 2980, 3428, 3435, 3482, 3020, 2748, 2646, 2787, 2760, 2563, 3085, 3133, 3158, 3170, 2703, 3494, 2556, 2552, 3395, 3245, 3404, 2675, 2791, 1911, 908, 1935, 2749, 3341, 3355, 2575, 2942, 2886, 2758, 2594, 3495, 2884, 3516, 3042, 2737, 2923, 3563, 2855, 3476, 2611, 2937, 3383, 3497, 3402, 3162, 2662, 2875, 3223, 2878, 1808, 3285, 2757, 3057, 2951, 3519, 2579, 2853, 3387, 3401, 3493, 3393, 1608, 3365, 2885, 3574, 3081, 3007, 3568, 3152, 3367, 3358, 336, 3468, 3290, 3550, 3132, 2726, 2879, 3190, 3309, 2613, 2765, 3106, 1355, 3454, 2851, 2881, 3232, 3458, 3326, 3353, 2927, 3212, 2950, 3376, 3208, 3062, 3612, 3195, 3385, 2686, 2602, 3569, 3123, 2727, 1622, 2821, 2636, 2750, 2850, 3050, 2925, 3336, 3540, 2689, 3139, 2526, 3361, 3022, 3427, 3107, 3140, 3371, 3276, 2831, 3501, 2924, 3366, 3199, 3101, 3321, 3499, 2917, 2683, 2800, 2812, 3340, 3227, 3148, 3657, 4446, 1464, 1886, 2666, 3246, 3130, 3560, 3236, 2730, 3572, 3689, 2968, 1457, 3450, 2577, 2567, 2532, 3415, 2934, 2984, 2568, 4147, 3002, 2986, 910, 2979, 2542, 1762, 4472, 1529, 4057, 1976, 4507, 1583, 1711, 2013, 1594, 4440, 344, 920, 921, 4498, 3728, 3637, 3570, 3429, 4091, 2870, 2995, 4338, 3205, 2880, 3261, 3968, 4291, 4204, 4071, 4034, 1742, 2820, 3912, 3287, 1218, 1190, 4145, 354, 1782, 927, 3610, 356, 4224, 1918, 1959, 1840, 3736, 1770, 929, 930, 931, 4155, 360, 361, 362, 364, 1279, 365, 1543, 366, 367, 4049, 1633, 1722, 369, 1495, 1566, 373, 1211, 1726, 1442, 1748, 4142, 1434, 1358, 1191, 3732, 4110, 4039, 4506, 4156, 4036, 4030, 4016, 3899, 1247, 1855, 3919, 1244, 4140, 3930, 4117, 4189, 4001, 3643, 3619, 1240, 1575, 3871, 4135, 4408, 3604, 1274, 4149, 3741, 1938, 3709, 3622, 3834, 1983, 1743, 3979, 4461, 4113, 3817, 4232, 4214, 3902, 1219, 1486, 1512, 1516, 4047, 4082, 4094, 1574, 1248, 4078, 1872, 1426, 3687, 4318, 4243, 3866, 3704, 4172, 1856, 3324, 2769, 2678, 1561, 3296, 377, 1395, 1584, 4093, 4453, 4210, 4009, 4264, 4339, 1738, 4474, 4013, 4266, 1771, 1759, 1922, 3860, 3832, 1349, 1381, 3663, 1185, 3932, 3858, 1198, 4192, 3611, 1919, 3790, 3712, 4095, 1887, 4468, 1720, 4247, 934, 1790, 2002, 1657, 1336, 3894, 3576, 4314, 3695, 1850, 4362, 1815, 3638, 4454, 1661, 4504, 1359, 3650, 1305, 1648, 3831, 4435, 4451, 1993, 3849, 1718, 4068, 1835, 1425, 1428, 4380, 1658, 1452, 4024, 4072, 3791, 4491, 4323, 4014, 1304, 1511, 1981, 1676, 4422, 1283, 3861, 3644, 4259, 1418, 1176, 4216, 1421, 3992, 4423, 4253, 3748, 4119, 1297, 1954, 4450, 3711, 4344, 1578, 4384, 3892, 3674, 3595, 4405, 3973, 4109, 4159, 3744, 4387, 4275, 4492, 4365, 4118, 4278, 3751, 3678, 4353, 3175, 2970, 1228, 3534, 3437, 3406, 3641, 4470, 3941, 4348, 3587, 3818, 4350, 3821, 3929, 3824, 4465, 1398, 3828, 1284, 3773, 4209, 3014, 3884, 2783, 4038, 3545, 2916, 3112, 2834, 3880, 4399, 4048, 3752, 4207, 1235, 3943, 4355, 4087, 4100, 4163, 4486, 4178, 1643, 4152, 4445, 4303, 4284, 1213, 4382, 1399, 3714, 4487, 3615, 4018, 4420, 4121, 3724, 4282, 4310, 4488, 4127, 3670, 4052, 3627, 3777, 1371, 3685, 4258, 3812, 1581, 4124, 4508, 4500, 3652, 3972, 1528, 3717, 2740, 3125, 3546, 3842, 4404, 3690, 3962, 4136, 3589, 3907, 4153, 2707, 4180, 3923, 4444, 4361, 4394, 3758, 4510, 3742, 1710, 1407, 4187, 1193, 1188, 1196, 1724, 1717, 1200, 1997, 1701, 4280, 4006, 1984, 3833, 2561, 4442, 3900, 4298, 1761, 4388, 1597, 4317, 4249, 1341, 1203, 1680, 4441, 3628, 3725, 1945, 937, 4206, 1588, 1439, 3794, 4447, 3776, 3658, 4064, 4011, 4272, 4503, 1324, 3594, 3680, 1300, 1750, 3913, 3774, 1877, 1987, 3998, 3686, 3696, 4463, 3853, 4244, 4083, 1909, 3897, 1546, 3613, 3273, 3452, 3525, 1229, 3835, 1234, 3970, 3856, 3586, 1175, 4321, 2778, 4412, 4407, 3823, 1427, 1507, 1878, 4333, 3146, 4281, 4211, 3843, 1677, 1524, 1525, 1974, 1239, 4167, 3740, 1342, 1471, 4176, 1232, 1989, 4125, 1741, 1580, 4060, 1576, 1212, 3921, 1174, 4061, 4021, 3693, 3734, 1382, 3684, 3806, 3635, 3976, 3840, 4286, 3836, 4161, 3659, 3605, 4392, 4328, 1316, 4173, 4265, 1246, 1629, 1829, 3826, 1992, 1656, 1914, 1839, 3984, 3910, 4160, 4184, 4132, 4250, 1792, 3769, 1534, 4003, 1689, 1599, 1265, 1410, 1823, 1498, 1329, 386, 940, 1655, 3874, 4261, 3626, 3579, 1644, 3936, 4054, 4260, 4297, 4357, 4022, 4046, 1222, 1996, 3788, 3953, 4226, 4277, 4101, 3797, 4019, 3771, 3632, 1402, 4137, 3772, 3661, 4186, 4174, 1170, 3850, 1315, 1611, 1859, 4183, 1403, 4033, 3623, 3596, 1461, 1848, 1173, 1928, 1765, 3719, 3584, 4165, 4191, 3980, 4058, 4200, 4336, 3958, 1260, 4051, 3798, 4032, 1774, 4322, 3991, 4106, 3978, 3965, 4464, 3813, 4154, 1365, 3846, 4345, 4379, 3603, 3937, 3801, 1787, 1214, 4483, 4201, 1845, 1220, 4245, 1347, 3867, 1900, 3640, 3916, 4089, 3745, 3975, 4256, 4308, 4000, 3868, 4403, 3883, 4326, 4393, 3895, 4237, 3955, 4005, 4092, 4372, 4283, 3805, 4151, 3982, 3597, 3872, 3987, 4490, 3876, 3668, 4300, 1679, 1242, 3598, 3583, 3647, 4304, 3779, 1907, 4042, 3648, 3996, 3800, 4367, 4099, 1807, 3887, 4428, 1625, 1390, 1884, 1682, 4364, 4306, 3869, 1278, 942, 1505, 1709, 3600, 3914, 3948, 1865, 1716, 3961, 1506, 4221, 1376, 1683, 4276, 1721, 1632, 3607, 1455, 1913, 1497, 1317, 1951, 1778, 3768, 4225, 1668, 390, 4406, 4341, 1480, 1714, 1422, 397, 3618, 4433, 1177, 3898, 398, 950, 400, 1965, 4471, 953, 401, 403, 955, 1482, 3602, 4434, 3721, 1592, 1825, 1698, 1519, 1352, 4409, 1977, 405, 1631, 1684, 409, 3889, 2117, 411, 413, 414, 415, 961, 1905, 416, 963, 3675, 1833, 3974, 965, 970, 1897, 1272, 4133, 3830, 972, 424, 427, 1708, 4141, 3749, 1619, 975, 4044, 3590, 1944, 4126, 1923, 1706, 432, 976, 978, 4400, 1606, 980, 2604, 2895, 436, 3448, 2188, 438, 1692, 442, 3862, 4055, 4358, 2276, 985, 1664, 443, 4309, 4045, 3854, 3682, 1972, 2688, 4366, 3425, 3231, 3649, 2759, 2724, 3755, 1216, 3599, 3775, 2754, 2606, 3471, 3234, 2565, 2803, 2562, 2684, 3411, 3405, 2690, 1255, 3694, 3985, 3535, 1306, 4084, 3282, 1780, 448, 990, 991, 1485, 992, 1728, 993, 994, 1696, 997, 3116, 1869, 456, 1386, 1000, 3879, 2698, 460, 1001, 461, 1447, 1002, 1003, 463, 464, 4425, 465, 1004, 466, 469, 1231, 1468, 470, 1005, 476, 1273, 1744, 1488, 1659, 1604, 479, 1013, 1014, 481, 4313, 1499, 1016, 4073, 1777, 485, 4274, 487, 1775, 4205, 1526, 1697, 2000, 488, 1894, 1882, 1817, 1880, 490, 1018, 3917, 3616, 4311, 4473, 4085, 4401, 3783, 3765, 1538, 3870, 491, 3699, 3792, 4290, 494, 2421, 4090, 2012, 1803, 3642, 1322, 1020, 502, 1333, 504, 1890, 507, 3608, 1732, 1864, 1816, 1531, 513, 3636, 514, 1699, 1027, 1366, 4950, 4027, 3478, 2959, 1293, 3197, 1595, 3413, 518, 1032, 1033, 1675, 1797, 2315, 521, 1999, 3759, 1215, 4122, 1730, 3966, 1035, 4973, 528, 3911, 3289, 1821, 530, 532, 1874, 533, 1038, 538, 539, 3767, 1929, 3683, 1338, 1616, 1901, 1796, 1517, 4331, 4332, 4466, 2719, 4123, 4233, 1824, 3129, 3087, 3505, 4158, 4254, 3720, 4351, 4414, 3453, 3254, 1649, 544, 4240, 3580, 1046, 548, 549, 2598, 552, 553, 3819, 1259, 4062, 554, 2841, 3515, 1433, 1323, 4301, 555, 558, 3738, 1567, 559, 1054, 1270, 3857, 2175, 1257, 1238, 3662, 561, 1058, 563, 1061, 4203, 1899, 3981, 1062, 1303, 4116, 1946, 3620, 1514, 4002, 3679, 3964, 3707, 3666, 1348, 4273, 1804, 4497, 1401, 4438, 1895, 1264, 1912, 573, 3939, 4170, 4056, 1271, 1521, 1221, 1451, 3934, 4080, 4352, 1700, 3739, 1419, 1811, 3950, 1690, 3716, 1569, 1437, 1674, 4337, 1285, 4268, 1183, 3881, 3938, 4198, 4416, 4229, 4292, 4193, 4325, 4375, 4432, 4215, 3944, 4195, 4223, 1540, 4455, 4512, 1723, 3750, 4070, 4104, 4235, 1863, 4346, 1881, 1814, 4443, 3761, 1587, 3592, 576, 4469, 1275, 1950, 4129, 1296, 1551, 3733, 4111, 3993, 4108, 1287, 1713, 1556, 1736, 1995, 1705, 1861, 4120, 4417, 1785, 1236, 4293, 1827, 3839, 3983, 4395, 1957, 3928, 4295, 3715, 3855, 3609, 4076, 4175, 3927, 1757, 4299, 1773, 1364, 1462, 4007, 3729, 3665, 3722, 1691, 1712, 1624, 1751, 1394, 3924, 3952, 581, 2003, 1559, 1250, 1555, 4114, 1818, 1076, 4448, 1078, 1786, 3354, 1832, 3432, 2891, 1903, 4459, 589, 1563, 1084, 591, 592, 594, 595, 1858, 596, 1453, 2559, 2590, 2738, 4478, 4069, 1809, 1327, 4150, 3260, 3481, 3672, 3625, 4439, 3852, 3997, 3847, 4050, 3377, 4424, 4143, 4493, 3492, 1412, 4017, 4477, 1794, 602, 4263, 3072, 2009, 1754, 3888, 603, 604, 1368, 3827, 4103, 1571, 1438, 611, 1093, 612, 1094, 3701, 4389, 614, 615, 1332, 1715, 4369, 1652, 1541, 1921, 1733, 1373, 1870, 619, 4218, 1798, 1702, 1384, 3700, 1788, 1600, 624, 2473, 1423, 2771, 1339, 3875, 3070, 2015, 2557, 2795, 2906, 2103, 3299, 3118, 4576, 1103, 1614, 1947, 631, 4479, 3766, 1107, 635, 1813, 636, 2431, 637, 1109, 639, 3706, 1110, 640, 642, 3735, 3390, 1694, 3431, 2838, 3483, 3464, 3848, 2558, 3314, 3086, 3029, 2956, 3517, 2651, 2914, 2680, 2632, 3121, 3100, 3528, 3526, 3084, 4220, 3304, 2846, 1186, 3235, 2903, 3559, 2687, 3409, 3237, 2900, 2999, 3349, 3171, 2752, 3262, 3504, 3047, 3193, 3430, 2525, 2670, 2911, 3508, 2776, 2697, 3200, 2790, 3323, 2543, 2874, 2614, 3904, 3373, 3054, 2617, 4242, 3621, 2708, 4179, 4398, 3959, 1269, 3095, 1286, 3624, 4481, 3511, 2735, 4381, 3295, 1568, 1766, 3221, 2643, 2739, 3920, 647, 1801, 4279, 3762, 1637, 1509, 648, 1117, 1119, 2965, 2695, 3293, 4722, 1121, 653, 1122, 3264, 655, 656, 657, 4035, 2910, 3391, 2808, 3099, 2913, 3676, 2852, 3284, 2731, 3537, 3994, 1319, 4467, 1623, 660, 1123, 664, 1126, 1128, 1129, 1130, 670, 1527, 671, 1772, 1137, 5005, 1933, 1731, 1793, 3342, 1140, 1141, 687, 3822, 1601, 1148, 693, 3905, 694, 1414, 1149, 697, 1795, 1372, 1695, 1866, 1151, 4115, 1719, 1920, 4999, 1544, 703, 4031, 4305, 1636, 3810, 4452, 3677, 4227, 4402, 4157, 4197, 1337, 1253, 4028, 3989, 704, 1493, 1902, 1152, 4182, 707, 708, 709, 4476, 1375, 713, 714, 1841, 4234, 1154, 1314, 4096, 718, 719, 720, 2063, 1311, 721, 4217, 1627, 1158, 1953, 1201, 3787, 729, 3747, 730, 1846, 3815, 1964, 1822, 1262, 4480, 1537, 1291, 1318, 4294, 1582, 3439, 2833, 4287, 4509, 4505, 4267, 3697, 3272, 4112, 2967, 3651, 1805, 3705, 1195, 3859, 1164, 1165, 2351, 2423, 1745, 1973, 3807, 4307, 1169, 1454, or 1781.

[0211] A VP capsid polypeptide may have a 581 to 589 region having a sequence of SEQ ID NO: 5014, wherein X⁷ of SEQ ID NO: 5014 is K or R. In some embodiments, the 581 to 589 region has a sequence of any one of SEQ ID NOs: 740, 15, 742, 743, 17, 22, 24, 1836, 32, 36, 2450, 39, 752, 753, 1998, 3059, 2519, 757, 48, 1952, 50, 52, 760, 2389, 54, 2346, 58, 4086, 1660, 1966, 768, 2402, 772, 71, 72, 2453, 3882, 775, 1806, 3669, 1356, 2132, 81, 84, 85, 87, 4040, 88, 1885, 782, 783, 784, 785, 94, 788, 2173, 98, 2007, 102, 113, 799, 4848, 1444, 4821, 2329, 115, 119, 2290, 123, 806, 128, 134, 812, 145, 817, 154, 2149, 821, 167, 171, 4596, 183, 830, 191, 194, 2071, 195, 4920, 831, 2223, 207, 3901, 211, 212, 213, 215, 224, 4782, 845, 846, 849, 850, 854, 247, 248, 2245, 255, 261, 264, 265, 1477, 270, 874, 876, 279, 882, 1930, 285, 286, 886, 2119, 2468, 887, 888, 4138, 297, 3844, 302, 893, 307, 308, 2155, 1431, 2312, 900, 1635, 906, 2799, 2128, 2918, 1363, 4251, 2622, 3333, 3474, 3614, 2732, 3166, 3151, 3088, 2883, 3318, 2645, 2733, 3213, 3782, 1844, 2523, 2520, 2997, 2681, 3035, 3279, 2764, 3480, 2787, 1808, 3101, 3689, 4147, 1762, 1976, 340, 1594, 2439, 348, 4498, 1518, 1782, 926, 357, 359, 932, 363, 369, 1873, 3780, 4140, 4001, 3709, 3834, 1752, 4113, 3817, 4232, 1340, 1489, 4214, 3902, 3820, 4330, 1872, 3687, 4318, 375, 4210, 3860, 4212, 3695, 1851, 4504, 1910, 1428, 4323, 4422, 4259, 1176, 3711, 4365, 4383, 3969, 4128, 3802, 3863, 3821, 4171, 3824, 4462, 3760, 3753, 2783, 3880, 3943, 4163, 4178, 4199, 3724, 3670, 4482, 3692, 4430, 4316, 3645, 3690, 3589, 3730, 4426, 3851, 4429, 1335, 1717, 1997, 1975, 4280, 4006, 3900, 4298, 4388, 1341, 1350, 1909, 4412, 4407, 4281, 4167, 1893, 3585, 4015, 1747, 4286, 3826, 1473, 1914, 3984, 4495, 4184, 3977, 1707, 4074, 4003, 3915, 1410, 1498, 940, 4131, 4357, 1925, 1466, 1611, 1530, 4168, 4245, 4075, 3987, 1679, 4306, 3869, 3768, 393, 2265, 3618, 4433, 947, 399, 401, 402, 4139, 1352, 406, 415, 418, 420, 4919, 431, 4044, 976, 433, 434, 435, 442, 3873, 3411, 3985, 987, 1485, 2262, 457, 458, 4425, 466, 467, 468, 1468, 474, 1008, 1012, 1016, 4518, 1697, 490, 3616, 2247, 2302, 499, 500, 501, 509, 2110, 512, 1797, 520, 525, 3966, 1038, 537, 1041, 3683, 2165, 542, 4331, 3129, 1044, 4351, 3453, 1047, 1323, 4301, 557, 3738, 559, 1270, 3857, 1056, 2186, 1057, 1059, 565, 566, 3981, 567, 3620, 4002, 3666, 3939, 1221, 1397, 1437, 4337, 4268, 3938, 4292, 4215, 3750, 3633, 4070, 3592, 1827, 3839, 4395, 3855, 3665, 1624, 2395, 1818, 586, 587, 1903, 1080, 1081, 1082, 589, 1084, 1085, 594, 596, 4439, 3997, 1962, 1087, 4777, 606, 607, 610, 1094, 4389, 1603, 1095, 616, 618, 622, 1104, 4536, 3706, 2481, 3100, 3200, 3621, 4179, 1432, 4381, 643, 1115, 644, 2307, 2477, 652, 657, 658, 3994, 4467, 661, 663, 665, 4600, 1137, 1933, 4840, 1140, 678, 680, 683, 686, 692, 693, 696, 2081, 2280, 698, 1400, 4197, 1532, 1854, 706, 711, 712, 4570, 714, 1841, 1314, 4096, 2249, 726, 1846, 2385, 1318, 733, 3651, 1165, 4839, 4968, 4684, or 1454.

[0212] A VP capsid polypeptide may have a 581 to 589 region having a sequence of SEQ ID NO: 5014, wherein X³ of SEQ ID NO: 5014 is a basic amino acid residue. In some embodiments, the 581 to 589 region has a sequence of any one of SEQ ID NOs: 739, 4177, 1289, 740, 741, 18, 745, 3477, 1548, 3051, 2982, 2877, 3036, 3426, 3073, 3169, 747, 3362, 2784, 21, 3192, 23, 1638, 748, 1703, 1836, 3660, 29, 750, 1640, 33, 34, 35, 36, 37, 38, 1205, 3795, 753, 4288, 4219, 2770, 2962, 4241, 4107, 2718, 3317, 4391, 4053, 3263, 2553, 3947, 2710, 2608, 3467, 2796, 2961, 2529, 3320, 2674, 2635, 3446, 3053, 3250, 3688, 1182, 1998, 4320, 3351, 2655, 3514, 2779, 3194, 3319, 3224, 3281, 3708, 2807, 3562, 3274, 3374, 3013, 3416, 2981, 3065, 2777, 3469, 2977, 2638, 2972, 3059, 2574, 3380, 4262, 3167, 3368, 2781, 3547, 3386, 1225, 2960, 3485, 3370, 3443, 2824, 3327, 3178, 3006, 3252, 2991, 3470, 2888, 2572, 3418, 2642, 2519, 3363, 40, 2633, 41, 42, 43, 755, 45, 756, 46, 48, 1952, 758, 49, 3122, 2551, 3718, 3484, 3577, 759, 1230, 3960, 1378, 2994, 3080, 2589, 3681, 52, 760, 53, 762, 4659, 54, 3925, 55, 3654, 56, 60, 61, 4086, 1740, 1660, 765, 766, 62, 1966, 63, 64, 768, 771, 65, 66, 67, 68, 3816, 2599, 2706, 2399, 74, 3865, 1549, 1361, 2453, 3882, 3713, 1942, 75, 1312, 4501, 76, 77, 78, 1560, 4289, 3757, 79, 3593, 4043, 1806, 3908, 4397, 1615, 4415, 3723, 2006, 3754, 1470, 4360, 3945, 2854, 3523, 3669, 82, 4065, 83, 1294, 1484, 3891, 4456, 4040, 4496, 1982, 2001, 1478, 1189, 88, 1490, 1885, 1926, 89, 90, 91, 779, 1180, 92, 785, 786, 94, 95, 1831, 1867, 4458, 97, 1970, 1936, 1590, 99, 100, 789, 790, 1298, 101, 1688, 791, 792, 2007, 103, 794, 795, 104, 105, 106, 1849, 108, 4736, 1579, 110, 1906, 113, 1444, 1344, 116, 802, 117, 118, 2158, 121, 803, 804, 1463, 805, 122, 2058, 124, 125, 127, 4994, 807, 132, 809, 810, 133, 1978, 812, 135, 136, 137, 138, 813, 4673, 140, 815, 1326, 141, 142, 143, 144, 145, 4816, 1634, 1302, 817, 146, 818, 147, 148, 149, 151, 152, 153, 154, 155, 819, 820, 157, 821, 159, 160, 163, 164, 165, 166, 822, 167, 168, 169, 170, 171, 823, 824, 1651, 173, 1483, 174, 175, 825, 176, 177, 180, 826, 827, 181, 828, 182, 183, 4641, 829, 184, 185, 186, 187, 188, 189, 830, 191, 192, 193, 194, 195, 196, 1391, 197, 2223, 200, 201, 202, 203, 204, 205, 832, 833, 206, 834, 835, 836, 1334, 837, 3901, 3312, 2649, 1301, 211, 212, 1450, 4386, 3028, 213, 1446, 214, 215, 1896, 1522, 3490, 838, 2241, 217, 218, 219, 1612, 220, 221, 222, 839, 223, 840, 224, 226, 227, 230, 231, 842, 232, 233, 235, 844, 236, 237, 2150, 851, 852, 853, 1536, 240, 854, 242, 243, 244, 245, 246, 247, 855, 4634, 249, 250, 251, 252, 253, 254, 255, 857, 256, 257, 258, 259, 858, 859, 260, 261, 860, 861, 862, 262, 2326, 264, 1241, 265, 266, 866, 1477, 267, 867, 869, 870, 271, 871, 872, 272, 874, 1252, 273, 1591, 275, 1980, 276, 876, 877, 277, 278, 279, 1892, 879, 1539, 880, 1295, 3601, 3877, 1930, 1420, 1678, 1460, 2306, 282, 1799, 283, 1626, 1374, 287, 1620, 1290, 1354, 888, 291, 1956, 889, 292, 4324, 293, 4138, 891, 2224, 3903, 297, 3829, 3809, 4271, 3844, 1436, 1515, 1617, 1961, 304, 306, 1589, 4370, 308, 309, 894, 3646, 4059, 1431, 1331, 4948, 312, 895, 1779, 313, 314, 315, 316, 896, 1558, 1552, 897, 898, 321, 322, 899, 1958, 2134, 324, 901, 325, 902, 326, 1491, 329, 330, 905, 4484, 1756, 3536, 2701, 2799, 3332, 3294, 3159, 3069, 2637, 3025, 2782, 3247, 3350, 2692, 2586, 3004, 3049, 2694, 2650, 3554, 2983, 3403, 3214, 3163, 2541, 3090, 3097, 3462, 1430, 2941, 3486, 2842, 3558, 3104, 3037, 3419, 2780, 2931, 1276, 2928, 2609, 3068, 3128, 2548, 2538, 2618, 2789, 3228, 2657, 3189, 2863, 3307, 3300, 2546, 3048, 3543, 2946, 2975, 3346, 3067, 2728, 2955, 3408, 3027, 3094, 3203, 2988, 2751, 2953, 2566, 2578, 2823, 3063, 3335, 3000, 3181, 3011, 3138, 3389, 2805, 3074, 2894, 3149, 2560, 3417, 3265, 3378, 2901, 2837, 2822, 2745, 3473, 3530, 3040, 2597, 3509, 3522, 3161, 2926, 3209, 3105, 3400, 2630, 2905, 2671, 2818, 2806, 2702, 2709, 3549, 3538, 2534, 2773, 2623, 3491, 3243, 3136, 2693, 3164, 3343, 2918, 2555, 2794, 2679, 3510, 3110, 2672, 3442, 2929, 3184, 3488, 3093, 2996, 3141, 3544, 3102, 2856, 2957, 3466, 3461, 2788, 2660, 3344, 3204, 2720, 3379, 2826, 1789, 2785, 3249, 3527, 4460, 3352, 2569, 4457, 2011, 4319, 3906, 1533, 1755, 1888, 4248, 1557, 1363, 1934, 1602, 1404, 4188, 1330, 4349, 3337, 3533, 2629, 3038, 2539, 3567, 3291, 3348, 3115, 3359, 2993, 3079, 3506, 2527, 2963, 2938, 2516, 3113, 1345, 2639, 3143, 3044, 2747, 3154, 3280, 3039, 2743, 2902, 3056, 2554, 2522, 3103, 3210, 3434, 2656, 4251, 4166, 4196, 3206, 3328, 2588, 3553, 2714, 3078, 3222, 3137, 3357, 2717, 2944, 3012, 3220, 3202, 2811, 3083, 3269, 3566, 2699, 2515, 3023, 2533, 3288, 3075, 3005, 2685, 3058, 2976, 2622, 3333, 3463, 2939, 3521, 3268, 3117, 2626, 2616, 3240, 2570, 3565, 2919, 3157, 2849, 3444, 2631, 3420, 2659, 3325, 3186, 2920, 3258, 3440, 3457, 3310, 2761, 3134, 2621, 3531, 2711, 2774, 2867, 2585, 3155, 2620, 3156, 2844, 3126, 3160, 2909, 3542, 3225, 2887, 3474, 3218, 2744, 2896, 3135, 3424, 3498, 3529, 2661, 2667, 2549, 2819, 2768, 2935, 3182, 2772, 3230, 3043, 2922, 3581, 3524, 2869, 2610, 3298, 2775, 3108, 2603, 3614, 2612, 2860, 3187, 3238, 3786, 4385, 3016, 3436, 2876, 2987, 3532, 3438, 3561, 3259, 2663, 2890, 3433, 3071, 3018, 2580, 2755, 3015, 2540, 3398, 2664, 2583, 2830, 2644, 2641, 3513, 2725, 2723, 3338, 3556, 2866, 2514, 2932, 2753, 2862, 2899, 2605, 2989, 3096, 3124, 2985, 2716, 3145, 3017, 2591, 2640, 3033, 1853, 3216, 3316, 3412, 2971, 3256, 3153, 3575, 3339, 2915, 2531, 3552, 3475, 3060, 3375, 2756, 3382, 2847, 2859, 3251, 3702, 3423, 2537, 2801, 3076, 2696, 3092, 3459, 3144, 3441, 2802, 3479, 2907, 3512, 3518, 3021, 2871, 3032, 2647, 2945, 3045, 2763, 3313, 3034, 3315, 3541, 2746, 2669, 2524, 3003, 2732, 3166, 3046, 3306, 2873, 3364, 3253, 3215, 3061, 2804, 2722, 2964, 2990, 2836, 4098, 4449, 3173, 2762, 3737, 2628, 3507, 2564, 3031, 2872, 3360, 2658, 2930, 2904, 3244, 3217, 3311, 3445, 2840, 3372, 2958, 3098, 3356, 3456, 3388, 2624, 3207, 2576, 2742, 2665, 2815, 3052, 3421, 2593, 3242, 2535, 2966, 2898, 2858, 2943, 2668, 2798, 3196, 2528, 2713, 3001, 2691, 2948, 2767, 2544, 3302, 2734, 2893, 2592, 2861, 3502, 2969, 2582, 3229, 2676, 2545, 3255, 3330, 2547, 3257, 2882, 3151, 3088, 2883, 3318, 2645, 2733, 2587, 3500, 3008, 2715, 2845, 3183, 2654, 3233, 3267, 2741, 2827, 2704, 3091, 2832, 2736, 3177, 3271, 2835, 2908, 3176, 2947, 3292, 3191, 2517, 3026, 3082, 3392, 3381, 2584, 2712, 3213, 3451, 2634, 3150, 2810, 3303, 2573, 3460, 2615, 3394, 2828, 3329, 4377, 4499, 3555, 2974, 3782, 3629, 3578, 3885, 2817, 3248, 2954, 3334, 3571, 3345, 3551, 3384, 3422, 1357, 1844, 2530, 2973, 4418, 4081, 3951, 1764, 1671, 1843, 3449, 3185, 3399, 2786, 3055, 3472, 3397, 2601, 3564, 3277, 4373, 3548, 3179, 3407, 3841, 3347, 3142, 4255, 4431, 3241, 3077, 2700, 3147, 2648, 3283, 2829, 3278, 2581, 2536, 4363, 2848, 3410, 2797, 2523, 2520, 2721, 3496, 2571, 3198, 3219, 3030, 2673, 2921, 3837, 3301, 3322, 2705, 3239, 2949, 3369, 3396, 2892, 2897, 2766, 3174, 3297, 2550, 2889, 2933, 2793, 2627, 2677, 3119, 2596, 3226, 3172, 3089, 2868, 2839, 3942, 3120, 3286, 2843, 3465, 1564, 3946, 4222, 1504, 3999, 2682, 1875, 2865, 3539, 3168, 2864, 3308, 3557, 2940, 3109, 3503, 2625, 3455, 3114, 2595, 3331, 2978, 2518, 2521, 4079, 3024, 3573, 2952, 2653, 1769, 3180, 2813, 2652, 2600, 2816, 3201, 3188, 3270, 2997, 2992, 3009, 3520, 2936, 3275, 3165, 3447, 3131, 3305, 2809, 2792, 2729, 2814, 2619, 3266, 2825, 3066, 2857, 2998, 3064, 2681, 3035, 3279, 2764, 3480, 3127, 2912, 3010, 2607, 3211, 3111, 3041, 1573, 3909, 4269, 3487, 3489, 3019, 335, 1266, 3435, 3482, 3020, 2748, 2646, 2787, 2760, 2563, 3085, 3133, 3158, 3170, 2703, 3494, 2552, 3395, 3245, 3404, 2675, 2791, 1911, 908, 1935, 2749, 3341, 3355, 2575, 2942, 2886, 2758, 2594, 3495, 2884, 3516, 3042, 2737, 2923, 3563, 2855, 3476, 2611, 2937, 3383, 3497, 3402, 3162, 2662, 2875, 3223, 2878, 1808, 3285, 2757, 3057, 2951, 3519, 2579, 2853, 3387, 3401, 3493, 3393, 1608, 3365, 2885, 3574, 3081, 3007, 3568, 3152, 3367, 3358, 336, 3468, 3290, 3550, 3132, 2726, 2879, 3190, 3309, 2613, 2765, 3106, 1355, 3454, 2851, 2881, 3232, 3458, 3326, 3353, 2927, 3212, 2950, 3376, 3208, 3062, 3612, 3195, 3385, 2686, 2602, 3569, 3123, 2727, 1622, 2821, 2636, 2750, 2850, 3050, 2925, 3336, 3540, 2689, 3139, 2526, 3361, 3022, 3427, 3107, 3140, 3371, 3276, 2831, 3501, 2924, 3366, 3199, 3101, 3321, 3499, 2917, 2683, 2800, 2812, 3340, 3227, 3148, 3657, 4446, 1746, 1464, 1886, 2666, 3246, 3130, 3560, 3236, 2730, 3572, 1607, 3689, 2968, 1457, 1500, 909, 337, 1184, 3450, 2577, 2567, 2532, 3415, 2934, 2984, 2568, 4147, 3002, 2986, 2979, 2542, 2492, 1762, 4472, 1472, 1529, 4057, 1976, 4507, 1583, 338, 911, 1711, 340, 912, 2013, 341, 1594, 4440, 917, 344, 918, 919, 921, 922, 347, 349, 351, 923, 924, 4498, 1518, 3728, 3637, 3570, 3429, 4091, 2870, 2995, 4338, 3205, 2880, 3261, 1994, 3968, 4291, 4204, 4071, 4034, 1742, 2820, 3912, 3287, 4145, 354, 925, 1782, 926, 927, 3610, 357, 358, 359, 4224, 1918, 1959, 3736, 1770, 931, 4155, 364, 1279, 365, 1543, 2472, 367, 4049, 1633, 1722, 368, 369, 1495, 1566, 370, 1211, 1873, 933, 1748, 4142, 1434, 1358, 1191, 3732, 4110, 4039, 4411, 4506, 4270, 4156, 3780, 4036, 4030, 4016, 1550, 3899, 1247, 1855, 1181, 3919, 1639, 3664, 1244, 4140, 3930, 4117, 4189, 4001, 3799, 3643, 3619, 1240, 1686, 1479, 1307, 1575, 4296, 1665, 3871, 4135, 1605, 4408, 3604, 1274, 3741, 1938, 3709, 1727, 3893, 1280, 3622, 1784, 3834, 1752, 1983, 1743, 3979, 4461, 4113, 3817, 4232, 1340, 1489, 4214, 1219, 1486, 1512, 1481, 1516, 3820, 3789, 4252, 4047, 4330, 4082, 4094, 1574, 1248, 4078, 1872, 1426, 3785, 3687, 4318, 4243, 3866, 3704, 4172, 1621, 4315, 1192, 1513, 1856, 3324, 2769, 2678, 1561, 3296, 377, 1395, 4093, 4453, 3940, 3778, 4374, 4210, 4009, 4264, 4339, 4368, 1738, 378, 1610, 4194, 4474, 4013, 4266, 1771, 3860, 3832, 1349, 1381, 3663, 1642, 1185, 4356, 3932, 1233, 4212, 3858, 1198, 4192, 3611, 1919, 1819, 3790, 3712, 1969, 4095, 1887, 4468, 1720, 4247, 2002, 1657, 1663, 1336, 3894, 1554, 1494, 1405, 3576, 4314, 3695, 1851, 4362, 1815, 3845, 4511, 3656, 3638, 1406, 1596, 4454, 1443, 1661, 1359, 1734, 3650, 1910, 1648, 3831, 4435, 1208, 1988, 4451, 1993, 1986, 3849, 1718, 4068, 1835, 1425, 1428, 1282, 4380, 1658, 1452, 1687, 4024, 379, 4072, 3791, 4491, 4323, 4014, 1304, 1440, 1511, 1981, 1676, 1547, 4422, 1618, 1871, 1256, 3748, 4119, 1297, 1586, 1251, 1299, 4450, 3990, 4029, 4097, 3890, 3796, 1389, 3711, 4344, 1578, 1476, 4343, 1202, 4413, 4384, 3808, 1647, 1475, 3892, 3674, 1739, 3926, 3595, 1943, 3756, 4405, 3973, 4109, 4159, 3744, 4387, 1960, 4275, 3781, 1535, 1210, 4492, 4365, 4118, 3655, 3886, 4278, 4383, 4485, 1392, 3751, 3931, 3986, 3678, 1249, 4353, 4208, 3710, 4238, 4213, 3969, 4436, 3175, 4128, 2970, 1228, 3534, 3437, 3406, 3641, 3639, 3954, 4335, 3995, 3582, 4475, 3784, 4470, 4010, 3802, 3941, 4427, 4396, 4348, 3587, 3818, 3864, 3956, 3863, 3731, 3814, 4067, 4354, 4350, 4334, 3821, 1932, 3929, 4171, 1258, 3824, 3631, 4465, 4494, 1320, 1398, 3828, 1204, 1223, 1284, 1685, 3773, 4209, 3014, 4462, 4246, 4190, 4312, 4023, 3760, 3753, 1178, 3884, 2783, 4038, 3545, 2916, 3112, 2834, 3880, 3673, 4102, 4399, 4048, 3752, 4207, 1235, 3943, 4355, 4087, 4100, 4327, 4037, 4163, 3918, 4486, 1243, 3933, 4178, 1662, 1643, 4152, 3634, 3617, 4445, 4303, 1370, 3838, 4199, 4284, 1213, 4382, 1399, 1187, 3714, 1828, 4487, 3615, 1842, 1501, 3746, 4018, 4420, 3606, 4121, 3724, 3935, 1941, 4419, 4282, 1955, 1949, 4310, 4488, 1577, 4127, 1288, 1171, 3670, 4052, 1860, 4124, 4508, 4500, 3652, 3972, 1309, 1630, 1528, 3717, 1217, 3692, 4430, 3764, 4316, 4285, 3645, 3971, 4421, 1172, 4026, 2740, 3125, 3546, 1725, 1206, 3842, 4404, 3690, 3962, 4513, 4340, 4329, 4410, 3703, 4136, 1763, 1487, 3589, 3907, 4153, 2707, 3730, 4426, 4180, 4041, 3923, 4444, 3851, 4429, 4361, 1441, 4394, 4302, 3758, 4510, 3742, 1868, 4077, 1710, 1939, 1335, 1997, 1975, 1701, 4280, 1613, 4006, 1984, 1351, 3653, 3833, 1593, 2561, 4442, 3900, 4298, 1761, 4388, 1820, 1597, 4317, 4249, 1341, 1680, 4441, 3628, 3725, 1945, 937, 4206, 1588, 1439, 3794, 4447, 1838, 3776, 3658, 4064, 1377, 4011, 4272, 4503, 1367, 3594, 3680, 1300, 1750, 3913, 3774, 1877, 1987, 1862, 3998, 1380, 4185, 3686, 3696, 4463, 1350, 4008, 4230, 3853, 4244, 4083, 381, 1909, 3897, 1546, 3613, 3273, 3452, 3525, 1229, 4105, 3835, 383, 1234, 3970, 1492, 3856, 3586, 1175, 4321, 4020, 4144, 1224, 1199, 3667, 2778, 4412, 4407, 1812, 1810, 3823, 1416, 1427, 1507, 1878, 4333, 3146, 4281, 4211, 1179, 3843, 1669, 1677, 1524, 1525, 1974, 384, 1979, 1456, 1239, 4167, 3740, 1876, 1388, 1967, 1474, 385, 1342, 4125, 1508, 1580, 4060, 4378, 1576, 1212, 1893, 3921, 3585, 1174, 1396, 4061, 4015, 1207, 3698, 3825, 3922, 4021, 4181, 1598, 1916, 1429, 4502, 4231, 1321, 4390, 3693, 3734, 1382, 3684, 1747, 3806, 3896, 3635, 1768, 4025, 3976, 3840, 3963, 4286, 1502, 3836, 4161, 3659, 3743, 4130, 3605, 1385, 1783, 4392, 4328, 1316, 4173, 4265, 1246, 1985, 1629, 1829, 1737, 1837, 1914, 1839, 1834, 3984, 4495, 3910, 4160, 3671, 4184, 4132, 4250, 1503, 1237, 1523, 1417, 4063, 1562, 3977, 1971, 1707, 1847, 1792, 3769, 4074, 1534, 4239, 4003, 3915, 1689, 1776, 1599, 1265, 1655, 3874, 4261, 3626, 1791, 3579, 1644, 3936, 4054, 4260, 4359, 4131, 4297, 4357, 4022, 3770, 4046, 1222, 1996, 3788, 4169, 1925, 3953, 4228, 4226, 4277, 4101, 1889, 1369, 3797, 4088, 4019, 3771, 3632, 1402, 1520, 1767, 1466, 1194, 4137, 1908, 1927, 1758, 3772, 3661, 4186, 4174, 1170, 3850, 1315, 1611, 1530, 941, 4033, 3623, 3596, 1461, 1848, 1173, 1928, 1459, 1765, 1826, 3719, 1931, 3584, 4004, 3591, 3967, 4168, 3957, 3878, 4165, 4191, 3980, 4058, 4200, 4336, 3958, 1260, 4051, 3798, 4032, 1774, 4322, 3991, 4106, 1641, 1570, 3978, 3965, 4464, 3813, 4154, 1365, 4257, 3846, 4345, 4379, 3603, 1693, 3937, 3801, 1787, 1214, 4483, 4201, 1898, 1220, 4245, 1347, 3867, 1900, 3640, 3916, 4089, 1209, 3745, 3988, 3975, 4236, 4075, 4146, 4256, 4308, 4000, 4148, 3588, 3868, 4403, 3883, 4326, 4393, 3895, 4237, 3955, 3727, 4005, 4092, 4372, 4283, 1553, 3805, 4151, 1281, 1681, 4489, 3982, 4437, 3597, 4342, 3872, 3987, 4490, 3876, 3668, 4300, 1679, 1242, 3598, 3583, 3647, 389, 4304, 3793, 3779, 1937, 1907, 4042, 3648, 3996, 3800, 4367, 4099, 1807, 3887, 4428, 1625, 1390, 1884, 1682, 4364, 4306, 3869, 1278, 1672, 942, 1505, 1542, 1709, 1915, 3600, 3914, 1968, 3948, 1670, 3811, 1865, 1362, 1716, 3961, 1506, 4221, 1376, 1683, 4276, 1445, 1721, 1632, 3607, 1328, 1455, 1913, 1497, 1317, 1951, 1778, 1379, 3768, 4225, 1668, 390, 391, 4406, 4341, 1480, 395, 1714, 1422, 396, 2265, 397, 3618, 4433, 1177, 3898, 398, 949, 950, 399, 951, 400, 1965, 2345, 4471, 952, 402, 2475, 403, 404, 4139, 1482, 3602, 4434, 3721, 1592, 1519, 1352, 4202, 4409, 1977, 1917, 407, 408, 1631, 1684, 409, 3889, 958, 959, 412, 960, 414, 415, 961, 1905, 416, 963, 417, 3675, 1833, 3974, 420, 421, 965, 966, 969, 970, 422, 1897, 4754, 423, 4133, 3830, 972, 424, 973, 427, 1708, 4141, 3749, 431, 1619, 975, 4044, 3590, 1944, 4126, 1923, 1706, 4400, 434, 1606, 979, 2604, 2895, 436, 3448, 1692, 983, 3862, 4055, 4358, 984, 985, 1664, 4045, 3854, 3682, 2491, 445, 1972, 2688, 4366, 3425, 3231, 3649, 2759, 2724, 3873, 3755, 1216, 3599, 3775, 2754, 2606, 3471, 3234, 2565, 2803, 2562, 2684, 3411, 3405, 2690, 1255, 3694, 3535, 1306, 4084, 3282, 1780, 987, 988, 450, 990, 451, 452, 991, 992, 1728, 994, 995, 454, 1696, 998, 3116, 1869, 456, 1386, 999, 3879, 2698, 1001, 461, 1447, 462, 464, 4425, 1645, 1231, 1468, 472, 473, 4725, 476, 1273, 1007, 1744, 1488, 1659, 477, 1604, 481, 4313, 482, 483, 1499, 484, 2513, 1016, 4073, 1777, 1458, 4274, 4539, 4528, 487, 1775, 4205, 1526, 1697, 1017, 2000, 489, 1882, 1817, 1880, 490, 1018, 3917, 3616, 4311, 1800, 4473, 4085, 4401, 1310, 3783, 3765, 491, 1948, 3699, 1735, 3792, 4290, 495, 4090, 2247, 496, 1019, 2012, 1803, 3642, 1322, 498, 1021, 501, 1022, 502, 1333, 503, 1023, 1890, 1025, 510, 1026, 3608, 1732, 511, 2397, 1864, 1816, 1531, 3636, 1699, 1027, 1029, 1366, 2112, 2124, 2376, 1261, 4027, 3478, 3763, 2959, 517, 3197, 1595, 3413, 1448, 518, 2057, 1675, 1797, 2148, 2420, 520, 2315, 523, 1999, 3759, 1215, 4122, 1730, 524, 526, 3966, 3911, 529, 3289, 1821, 530, 531, 1874, 1038, 536, 537, 3767, 1929, 1041, 1042, 3683, 542, 1338, 1517, 4331, 4332, 4466, 2719, 3803, 4123, 4233, 1824, 3129, 3087, 3505, 4158, 4254, 1449, 3720, 4351, 4414, 1673, 3453, 3254, 1649, 544, 545, 546, 4240, 3580, 1046, 1047, 550, 2598, 551, 552, 3819, 1259, 4062, 2841, 1050, 3515, 4301, 557, 1052, 1053, 3738, 1567, 1270, 3857, 1055, 2198, 1257, 1238, 3662, 561, 562, 1058, 566, 1060, 1061, 2231, 4203, 1899, 3981, 1062, 1303, 4116, 567, 1946, 3620, 1514, 4002, 3679, 3964, 3707, 3666, 1348, 4273, 1804, 4497, 1401, 4438, 1895, 1264, 572, 1912, 3939, 4170, 4056, 1271, 1065, 1521, 1221, 1451, 1654, 3934, 4080, 4352, 1700, 3739, 1565, 1419, 1811, 3950, 1690, 1397, 3716, 1437, 1674, 4337, 1285, 4268, 1183, 3726, 3881, 4134, 4347, 4012, 3938, 4066, 4198, 4416, 4164, 3630, 4229, 4292, 4193, 4325, 4375, 4371, 4432, 4215, 1753, 3944, 1409, 4195, 1729, 4223, 1540, 1723, 1070, 3750, 3633, 4070, 4104, 4162, 4235, 1863, 4346, 1881, 1814, 1572, 4443, 3761, 1346, 1587, 1072, 3592, 576, 1891, 4469, 1275, 1950, 1963, 4129, 1296, 1551, 3733, 4111, 3993, 4108, 3949, 1287, 1713, 1736, 1995, 1435, 1424, 1830, 1705, 1861, 1197, 1254, 4120, 1545, 4417, 1469, 1785, 1236, 4293, 3839, 3983, 4395, 1957, 3928, 4295, 3715, 3855, 3609, 1990, 4076, 4175, 3927, 1757, 1650, 4299, 1773, 2004, 1267, 1364, 579, 1462, 1879, 4007, 3729, 3665, 3722, 1691, 1624, 1751, 1394, 3924, 3952, 580, 581, 2003, 1343, 1559, 1250, 1555, 4114, 1818, 1075, 1076, 1077, 1704, 4448, 1078, 1079, 1786, 585, 3354, 1832, 3432, 2891, 2505, 1903, 1081, 1082, 4459, 1083, 1563, 590, 591, 1085, 594, 597, 598, 1453, 2559, 2590, 2738, 4478, 4069, 1809, 1327, 4150, 3260, 3481, 3672, 3625, 2008, 4439, 3852, 3997, 1411, 599, 3847, 1268, 4050, 3377, 4424, 1496, 4143, 4493, 3492, 1962, 600, 601, 4017, 4477, 1794, 4263, 3072, 2009, 1754, 1087, 1088, 3888, 2324, 605, 1368, 3827, 4103, 606, 4549, 1090, 1571, 1091, 1438, 1092, 1093, 612, 1094, 3701, 4389, 613, 1603, 616, 1332, 1715, 4369, 1652, 1096, 617, 1541, 618, 1921, 1733, 1373, 1870, 619, 4218, 1798, 1099, 1100, 1702, 2239, 1101, 1667, 1384, 623, 3700, 1788, 1600, 624, 626, 2771, 627, 1339, 3875, 628, 629, 3070, 4818, 4860, 2557, 2795, 2906, 3118, 4657, 4646, 4875, 4627, 4747, 1614, 1947, 4618, 4479, 3766, 632, 1104, 1105, 633, 635, 1813, 636, 2213, 3706, 1110, 640, 1111, 641, 642, 1694, 3431, 2838, 3483, 3464, 3848, 2558, 3314, 3086, 3029, 2956, 3517, 2651, 2914, 2680, 2632, 3121, 3100, 3528, 3526, 3084, 4220, 3304, 2846, 1186, 3235, 2903, 3559, 2687, 3409, 3237, 2900, 2999, 3349, 3171, 2752, 3262, 3504, 3047, 4376, 3193, 3430, 2525, 2670, 2911, 3508, 2776, 2697, 3200, 2790, 3323, 2543, 2874, 2614, 3904, 3373, 3054, 2617, 4242, 3621, 2708, 4179, 4398, 3959, 3095, 1286, 3624, 4481, 1432, 3511, 2735, 4381, 3295, 1585, 1114, 1766, 3221, 2643, 2739, 3920, 644, 1116, 645, 646, 2307, 647, 1801, 4279, 3762, 1637, 1509, 1119, 2965, 2369, 2695, 3293, 650, 651, 1120, 652, 1121, 4909, 1122, 3264, 655, 658, 659, 4035, 2910, 3391, 2808, 3099, 2913, 3676, 2852, 3284, 2731, 1609, 3994, 1319, 4467, 1802, 1227, 1623, 661, 2364, 662, 663, 664, 1124, 1125, 1127, 1128, 1129, 668, 669, 1130, 670, 1131, 1527, 1132, 671, 1772, 1135, 672, 5005, 2208, 4952, 4945, 1933, 1731, 1793, 675, 676, 3342, 1138, 1139, 677, 679, 1142, 1143, 681, 1145, 682, 685, 688, 3822, 689, 690, 691, 1147, 1601, 3905, 694, 695, 1414, 4793, 4575, 1150, 1795, 1372, 1695, 1866, 4115, 1719, 698, 2217, 1920, 699, 700, 1544, 702, 703, 4031, 4305, 1636, 1393, 2010, 3810, 4452, 3677, 4227, 1277, 1400, 4402, 4157, 4197, 1337, 1253, 1532, 4028, 3989, 1493, 1854, 1902, 1510, 2340, 4182, 706, 707, 708, 4476, 1245, 714, 1841, 4234, 1314, 4096, 717, 1155, 2249, 4217, 1156, 723, 1157, 1627, 725, 1159, 1953, 1160, 1201, 727, 3787, 4568, 3747, 730, 1846, 3815, 2005, 1964, 1822, 1262, 4480, 1537, 1291, 1318, 4294, 1582, 734, 3439, 2833, 4287, 4509, 4505, 4267, 3697, 3272, 4112, 2967, 3651, 1628, 3705, 1195, 3859, 1164, 2394, 1165, 1166, 1745, 1973, 1168, 3807, 4307, 2303, 1454, or 1781.

[0213] A VP capsid polypeptide may have a 581 to 589 region having a sequence of SEQ ID NO: 5014, wherein X⁶ of SEQ ID NO: 5014 is a basic amino acid residue. In some embodiments, the 581 to 589 region has a sequence of any one of SEQ ID NOs: 4884, 738, 4177, 1289, 740, 14, 743, 744, 17, 3477, 1548, 3051, 2982, 2877, 746, 19, 3036, 3426, 3073, 3169, 747, 3362, 2784, 4889, 21, 3192, 4942, 22, 1638, 748, 24, 749, 27, 1703, 1836, 28, 3660, 29, 750, 1640, 33, 35, 36, 2450, 1653, 1205, 3795, 753, 4288, 4219, 2770, 2962, 4241, 4107, 2718, 3317, 4391, 3263, 2553, 3947, 2710, 2608, 3467, 2796, 2961, 2529, 3320, 2674, 2635, 3446, 3053, 3250, 3688, 1998, 4320, 3351, 2655, 3514, 2779, 3194, 3319, 3224, 3281, 3708, 2807, 3562, 3274, 3374, 3013, 3416, 2981, 3065, 2777, 3469, 2977, 2638, 2972, 3059, 2574, 3380, 4262, 3167, 3368, 2781, 3547, 3386, 1225, 2960, 3485, 3370, 3443, 2824, 1467, 3327, 3178, 3006, 3252, 2991, 3470, 2888, 2572, 3418, 2642, 2519, 3363, 40, 2633, 44, 45, 756, 47, 48, 1952, 3122, 2551, 3718, 3484, 3577, 759, 50, 1308, 3960, 1378, 2994, 3080, 2589, 3681, 51, 760, 2389, 762, 3925, 3654, 763, 4626, 59, 60, 4086, 1740, 1660, 62, 1966, 63, 2438, 768, 66, 67, 2197, 68, 3816, 2599, 2706, 72, 73, 74, 3865, 1549, 1361, 2453, 3882, 773, 3713, 1942, 1312, 4501, 76, 1413, 775, 1560, 4289, 3757, 3593, 3908, 4397, 4415, 3723, 3754, 4360, 3945, 2854, 3523, 3669, 1356, 2132, 4065, 1294, 1484, 85, 86, 3891, 4456, 4040, 4496, 1982, 2001, 1478, 1189, 1490, 1885, 1926, 89, 780, 1180, 92, 781, 782, 783, 2356, 786, 94, 95, 788, 1831, 1867, 96, 4458, 97, 1970, 4656, 1936, 1590, 98, 99, 789, 790, 1298, 101, 1688, 791, 792, 2007, 102, 103, 104, 105, 107, 108, 1579, 110, 1906, 111, 798, 112, 799, 800, 2461, 1444, 801, 114, 115, 1344, 116, 802, 117, 118, 119, 121, 803, 1463, 1760, 124, 806, 126, 128, 807, 129, 131, 808, 2281, 133, 1978, 811, 812, 135, 136, 137, 138, 814, 140, 1326, 141, 142, 143, 2344, 816, 1634, 1302, 817, 818, 147, 148, 149, 150, 151, 154, 155, 819, 820, 156, 157, 2295, 158, 161, 162, 165, 822, 168, 169, 170, 823, 172, 1651, 173, 1483, 174, 825, 176, 178, 180, 827, 181, 828, 4911, 184, 185, 186, 188, 189, 830, 192, 193, 194, 196, 1391, 197, 198, 199, 200, 201, 202, 203, 4775, 205, 832, 206, 834, 207, 208, 209, 210, 835, 836, 1334, 3901, 3312, 2649, 1450, 4386, 3028, 1446, 2206, 215, 1522, 3490, 217, 219, 1612, 220, 221, 222, 839, 223, 840, 224, 225, 4751, 228, 229, 230, 231, 2448, 842, 232, 233, 4782, 234, 235, 238, 847, 239, 850, 851, 853, 1536, 240, 241, 242, 243, 244, 245, 246, 247, 4923, 4696, 250, 251, 254, 255, 857, 256, 258, 259, 859, 260, 861, 862, 4966, 864, 263, 4970, 2318, 865, 2326, 264, 1241, 266, 1477, 867, 268, 868, 269, 270, 869, 870, 271, 871, 872, 272, 873, 4655, 4972, 1252, 1591, 875, 274, 275, 1980, 276, 876, 877, 2066, 277, 278, 280, 2323, 1892, 1539, 2214, 881, 882, 3601, 3877, 1930, 1460, 282, 1799, 284, 4553, 4772, 1626, 286, 1374, 1620, 1290, 1354, 887, 1956, 889, 4765, 292, 4324, 4138, 891, 296, 3903, 297, 3829, 3809, 4271, 3844, 1436, 300, 1617, 1961, 5010, 302, 304, 305, 2147, 1589, 4370, 307, 3646, 4059, 1431, 1331, 312, 1779, 313, 896, 1558, 1552, 318, 319, 322, 1958, 2454, 323, 324, 901, 1491, 328, 329, 330, 4820, 4484, 1756, 907, 4584, 3536, 2701, 2799, 3332, 3294, 3159, 3069, 2637, 3025, 2782, 3247, 3350, 2692, 2586, 3004, 3049, 2694, 2650, 3554, 2983, 3403, 3214, 3163, 2541, 3090, 3097, 3462, 1430, 2941, 3486, 2842, 3558, 3104, 3037, 3419, 2780, 2931, 1276, 2928, 2609, 3068, 3128, 2548, 2538, 2618, 2789, 3228, 2657, 3189, 2863, 3307, 3300, 2546, 3048, 3543, 2946, 2975, 3346, 3067, 2728, 2955, 3408, 3027, 3094, 3203, 2988, 2751, 2953, 2566, 2578, 2823, 3063, 3335, 3000, 3181, 3011, 3138, 3389, 2805, 3074, 2894, 3149, 2560, 3417, 3265, 3378, 2901, 2837, 2822, 2745, 3473, 3530, 3040, 2597, 3509, 3522, 3161, 2926, 3209, 3105, 3400, 2630, 2905, 2671, 2818, 2806, 2702, 2709, 3549, 3538, 2534, 2773, 2623, 3491, 3243, 3136, 2693, 3164, 3343, 2918, 2555, 2794, 2679, 3510, 3110, 2672, 3442, 2929, 3184, 3488, 3414, 3093, 2996, 3141, 3544, 3102, 2856, 2957, 3466, 3461, 2788, 2660, 3344, 3204, 2720, 3379, 2826, 1789, 2785, 3249, 3527, 4460, 3352, 2569, 4457, 2011, 4319, 3906, 1533, 1755, 4248, 1557, 3804, 1602, 4188, 1330, 4349, 3337, 3533, 2629, 3038, 2539, 3567, 3291, 3348, 3115, 3359, 2993, 3079, 3506, 2527, 2963, 2938, 2516, 3113, 2639, 3143, 3044, 2747, 3154, 3280, 3039, 2743, 2902, 3056, 2554, 2522, 3103, 3210, 3434, 2656, 4251, 4196, 3206, 3328, 2588, 3553, 2714, 3078, 3222, 3137, 3357, 2717, 2944, 3012, 3220, 3202, 2811, 3083, 3269, 3566, 2699, 2515, 3023, 2533, 3288, 3075, 3005, 2685, 3058, 2976, 2622, 3333, 3463, 2939, 3521, 3268, 3117, 2626, 2616, 3240, 2570, 3565, 2919, 3157, 2849, 3444, 2631, 3420, 2659, 3325, 3186, 2920, 3258, 3440, 3457, 3310, 2761, 3134, 2621, 3531, 2711, 2774, 2867, 2585, 3155, 2620, 3156, 2844, 3126, 3160, 2909, 3542, 3225, 2887, 3474, 3218, 2744, 2896, 3135, 3424, 3498, 3529, 2661, 2667, 2549, 2819, 2768, 2935, 3182, 2772, 3230, 3043, 2922, 3581, 2869, 2610, 3298, 2775, 3108, 2603, 2612, 2860, 3187, 3238, 3786, 4385, 3016, 3436, 2876, 2987, 3532, 3438, 3561, 3259, 2663, 2890, 3433, 3071, 3018, 2580, 2755, 3015, 2540, 3398, 2664, 2583, 2830, 2644, 2641, 3513, 2725, 2723, 3338, 3556, 2866, 2514, 2932, 2753, 2862, 2899, 2605, 2989, 3096, 3124, 2985, 2716, 3145, 3017, 2591, 2640, 3033, 3216, 3316, 3412, 2971, 3256, 3153, 3575, 3339, 2915, 2531, 3552, 3475, 3060, 3375, 2756, 3382, 2847, 2859, 3251, 3702, 3423, 2537, 2801, 3076, 2696, 3092, 3459, 3144, 3441, 2802, 3479, 2907, 3512, 3518, 3021, 2871, 3032, 2647, 2945, 3045, 2763, 3313, 3034, 3315, 3541, 2746, 2669, 2524, 3003, 2732, 3166, 3046, 3306, 2873, 3364, 3253, 3215, 3061, 2804, 2722, 2964, 2990, 2836, 3173, 2762, 3737, 2628, 3507, 2564, 3031, 2872, 3360, 2658, 2930, 2904, 3244, 3217, 3311, 3445, 2840, 3372, 2958, 3098, 3356, 3456, 3388, 2624, 3207, 2576, 2742, 2665, 2815, 3052, 3421, 2593, 3242, 2535, 2966, 2898, 2858, 2943, 2668, 2798, 3196, 2528, 2713, 3001, 2691, 2948, 2767, 2544, 3302, 2734, 2893, 2592, 2861, 3502, 2969, 2582, 3229, 2676, 2545, 3255, 3330, 2547, 3257, 2882, 3151, 3088, 2883, 3318, 2645, 2733, 2587, 3500, 3008, 2715, 2845, 3183, 2654, 3233, 3267, 2741, 2827, 2704, 3091, 2832, 2736, 3177, 3271, 2835, 2908, 3176, 2947, 3292, 3191, 2517, 3026, 3082, 3392, 3381, 2584, 2712, 3213, 3451, 2634, 3150, 2810, 3303, 2573, 3460, 2615, 3394, 2828, 3329, 4377, 4499, 3555, 2974, 3629, 3578, 3885, 2817, 3248, 2954, 3334, 3571, 3345, 3551, 3384, 3422, 2530, 2973, 4418, 4081, 3951, 1764, 1671, 1843, 3449, 3185, 3399, 2786, 3055, 3472, 3397, 2601, 3564, 3277, 4373, 3548, 3179, 3407, 3841, 3347, 3142, 4431, 3241, 3077, 2700, 3147, 2648, 3283, 2829, 3278, 2581, 2536, 4363, 2848, 3410, 2797, 2523, 2520, 2721, 3496, 2571, 3198, 3219, 3030, 2673, 2921, 3301, 3322, 2705, 3239, 2949, 3369, 3396, 2892, 2897, 2766, 3174, 3297, 2550, 2889, 2933, 2793, 2627, 2677, 3119, 2596, 3226, 3172, 3089, 2868, 2839, 3120, 3286, 2843, 3465, 3946, 4222, 2682, 2865, 3539, 3168, 2864, 3308, 3557, 2940, 3109, 3503, 2625, 3455, 3114, 2595, 3331, 2978, 2518, 2521, 4079, 3024, 3573, 2952, 2653, 3180, 2813, 2652, 2600, 2816, 3201, 3188, 3270, 2997, 2992, 3009, 3520, 2936, 3275, 3165, 3447, 3131, 3305, 2809, 2792, 2729, 2814, 2619, 3266, 2825, 3066, 2857, 2998, 3064, 2681, 3035, 3279, 2764, 3480, 3127, 2912, 3010, 2607, 3211, 3111, 3041, 4269, 3487, 3489, 3019, 1266, 1415, 2980, 3428, 3435, 3482, 3020, 2748, 2646, 2787, 2760, 2563, 3085, 3133, 3158, 3170, 2703, 3494, 2556, 2552, 3395, 3245, 3404, 2675, 2791, 1911, 908, 1935, 2749, 3341, 3355, 2575, 2942, 2886, 2758, 2594, 3495, 2884, 3516, 3042, 2737, 2923, 3563, 2855, 3476, 2611, 2937, 3383, 3497, 3402, 3162, 2662, 2875, 3223, 2878, 1808, 3285, 2757, 3057, 2951, 3519, 2579, 2853, 3387, 3401, 3493, 3393, 1608, 3365, 2885, 3574, 3081, 3007, 3568, 3152, 3367, 3358, 336, 3468, 3290, 3550, 3132, 2726, 2879, 3190, 3309, 2613, 2765, 3106, 1355, 3454, 2851, 2881, 3232, 3458, 3326, 3353, 2927, 3212, 2950, 3376, 3208, 3062, 3612, 3195, 3385, 2686, 2602, 3569, 3123, 2727, 1622, 2821, 2636, 2750, 2850, 3050, 2925, 3336, 3540, 2689, 3139, 2526, 3361, 3022, 3427, 3107, 3140, 3371, 3276, 2831, 3501, 2924, 3366, 3199, 3101, 3321, 3499, 2917, 2683, 2800, 2812, 3340, 3227, 3148, 3657, 4446, 1746, 1464, 1886, 2666, 3246, 3130, 3560, 3236, 2730, 3572, 3689, 2968, 1457, 3450, 2577, 2567, 2532, 3415, 2934, 2984, 2568, 4147, 3002, 2986, 910, 2979, 2542, 1762, 4472, 1529, 4057, 1976, 4507, 1583, 1711, 2013, 1594, 4440, 343, 344, 920, 921, 348, 4498, 3728, 3637, 3570, 3429, 4091, 2870, 2995, 4338, 3205, 2880, 3261, 3968, 4291, 4204, 4071, 4034, 1742, 2820, 3912, 3287, 1218, 1190, 4145, 354, 1782, 927, 3610, 356, 4224, 1918, 1959, 1840, 3736, 1770, 929, 930, 931, 4155, 360, 361, 362, 364, 1279, 365, 1543, 366, 367, 4049, 1633, 1722, 369, 1495, 1566, 373, 1211, 2494, 1726, 1442, 1748, 4142, 1434, 1358, 1191, 3732, 4110, 4039, 4411, 4506, 4156, 4036, 4030, 4016, 3899, 1247, 1855, 3919, 1244, 4140, 3930, 4117, 4189, 4001, 3643, 3619, 1240, 1575, 3871, 4135, 4408, 3604, 1274, 4149, 3741, 1938, 3709, 3622, 3834, 1983, 1743, 3979, 4461, 4113, 3817, 4232, 4214, 3902, 1219, 1486, 1512, 1516, 4047, 4082, 4094, 1574, 1248, 4078, 1872, 1426, 3785, 3687, 4318, 4243, 3866, 3704, 4172, 1513, 1856, 3324, 2769, 2678, 1561, 3296, 2348, 377, 1395, 1584, 4093, 4453, 3778, 4210, 4009, 4264, 4339, 1738, 4194, 4474, 4013, 4266, 1771, 1759, 1922, 3860, 3832, 1349, 1381, 3663, 1185, 3932, 3858, 1198, 4192, 3611, 1919, 3790, 3712, 4095, 1887, 4468, 1720, 4247, 934, 1790, 2002, 1657, 1336, 3894, 1554, 3576, 4314, 3695, 1850, 4362, 1815, 3656, 3638, 4454, 1443, 1661, 4504, 1359, 3650, 1305, 1648, 3831, 4435, 4451, 1993, 3849, 1718, 4068, 1835, 1425, 1428, 4380, 1658, 1452, 4024, 4072, 3791, 4491, 4323, 4014, 1304, 1511, 1981, 1676, 4422, 1283, 3861, 3644, 4259, 1749, 1418, 1176, 4216, 1924, 1421, 3992, 4423, 4253, 3748, 4119, 1297, 1299, 1954, 4450, 3990, 4029, 3711, 4344, 1578, 4384, 3892, 3674, 3595, 4405, 3973, 4109, 4159, 3744, 4387, 1960, 4275, 4492, 4365, 4118, 3655, 3886, 4278, 3751, 3678, 4353, 3175, 2970, 1228, 3534, 3437, 3406, 3641, 3639, 4470, 3941, 4348, 3587, 3818, 3814, 4350, 3821, 3929, 3824, 4465, 4494, 1398, 3828, 1284, 3773, 4209, 3014, 3884, 2783, 4038, 3545, 2916, 3112, 2834, 3880, 4399, 4048, 3752, 4207, 1235, 3943, 4355, 4087, 4100, 4163, 4486, 4178, 1643, 4152, 3634, 4445, 4303, 4284, 1213, 4382, 1399, 3714, 4487, 3615, 4018, 4420, 4121, 3724, 4282, 4310, 4488, 4127, 3670, 4052, 3627, 3777, 1371, 3685, 4482, 4258, 3812, 1581, 4124, 4508, 4500, 3652, 3972, 1309, 1528, 3717, 1217, 2740, 3125, 3546, 3842, 4404, 3690, 3962, 4329, 4410, 3703, 4136, 3589, 3907, 4153, 2707, 4180, 3923, 4444, 4361, 4394, 4302, 3758, 4510, 3742, 1710, 1335, 1666, 1407, 4187, 1193, 1188, 1196, 1724, 1717, 1200, 1997, 1701, 4280, 4006, 1984, 3833, 1593, 2561, 4442, 3900, 4298, 1761, 4388, 1597, 4317, 4249, 1341, 1203, 1680, 4441, 3628, 3725, 1945, 937, 4206, 1588, 1439, 3794, 4447, 3776, 3658, 4064, 4011, 4272, 4503, 1324, 1367, 3594, 3680, 1300, 1750, 3913, 3774, 1877, 1987, 3998, 1380, 4185, 3686, 3696, 4463, 3853, 4244, 4083, 1909, 3897, 1546, 3613, 3273, 3452, 3525, 1229, 3835, 1234, 3970, 3856, 3586, 1175, 4321, 2778, 4412, 4407, 1810, 3823, 1427, 1507, 1878, 4333, 3146, 4281, 4211, 1179, 3843, 1677, 1524, 1525, 1974, 1239, 4167, 3740, 1342, 1471, 4176, 1232, 1989, 4125, 1741, 1580, 4060, 1576, 1212, 3921, 1174, 4061, 4021, 3693, 3734, 1382, 3684, 3806, 3635, 3976, 3840, 4286, 3836, 4161, 3659, 3743, 3605, 4392, 4328, 1316, 4173, 4265, 1246, 1629, 1829, 3826, 1992, 1656, 1837, 1914, 1839, 3984, 3910, 4160, 4184, 4132, 4250, 1562, 1847, 1792, 3769, 1534, 4003, 1689, 1599, 1265, 1410, 1823, 1498, 1329, 386, 940, 1655, 3874, 4261, 3626, 3579, 1644, 3936, 4054, 4260, 4297, 4357, 4022, 4046, 1222, 1996, 3788, 3953, 4226, 4277, 4101, 3797, 4019, 3771, 3632, 1402, 4137, 3772, 3661, 4186, 4174, 1170, 3850, 1315, 1611, 1859, 4183, 1403, 4033, 3623, 3596, 1461, 1848, 1173, 1928, 1765, 3719, 3584, 3591, 4165, 4191, 3980, 4058, 4200, 4336, 3958, 1260, 4051, 3798, 4032, 1774, 4322, 3991, 4106, 3978, 3965, 4464, 3813, 4154, 1365, 3846, 4345, 4379, 3603, 1693, 3937, 3801, 1787, 1214, 4483, 4201, 1898, 1845, 1220, 4245, 1347, 3867, 1900, 3640, 3916, 4089, 3745, 3975, 4256, 4308, 4000, 3868, 4403, 3883, 4326, 4393, 3895, 4237, 3955, 4005, 4092, 4372, 4283, 3805, 4151, 3982, 3597, 3872, 3987, 4490, 3876, 3668, 4300, 1679, 1242, 3598, 3583, 3647, 4304, 3779, 1907, 4042, 3648, 3996, 3800, 4367, 4099, 1807, 3887, 4428, 1625, 1390, 1884, 1682, 4364, 4306, 3869, 1278, 942, 1505, 1542, 1709, 3600, 3914, 3948, 1865, 1716, 3961, 1506, 4221, 1376, 1683, 4276, 1721, 1632, 3607, 1455, 1913, 1497, 1317, 1951, 1778, 3768, 4225, 1668, 390, 4406, 4341, 1480, 392, 1714, 1422, 397, 3618, 4433, 1177, 3898, 398, 950, 400, 1965, 4471, 953, 401, 403, 955, 1482, 3602, 4434, 3721, 1592, 1825, 1698, 1519, 1352, 4409, 1977, 405, 1631, 1684, 409, 3889, 2117, 411, 413, 414, 415, 961, 1905, 416, 963, 3675, 1833, 3974, 965, 970, 1897, 1272, 971, 4133, 3830, 972, 424, 427, 1708, 4141, 3749, 1619, 975, 4044, 3590, 1944, 4126, 1923, 1706, 432, 976, 978, 4400, 433, 1606, 980, 2604, 2895, 436, 3448, 2188, 438, 1692, 982, 2243, 439, 442, 3862, 4055, 4358, 2276, 985, 1664, 443, 4309, 4045, 3854, 3682, 1972, 2688, 4366, 3425, 3231, 3649, 2759, 2724, 3755, 1216, 3599, 3775, 2754, 2606, 3471, 3234, 2565, 2803, 2562, 2684, 3411, 3405, 2690, 1255, 3694, 3985, 3535, 1306, 4084, 3282, 1353, 1780, 448, 2031, 990, 991, 1485, 992, 1728, 993, 4703, 994, 1696, 997, 998, 3116, 1869, 456, 1386, 4778, 2040, 1000, 4981, 3879, 2698, 460, 1001, 461, 1447, 1002, 1003, 463, 464, 4425, 465, 1004, 466, 469, 1231, 1468, 470, 2496, 1005, 476, 1273, 1744, 1488, 1659, 4598, 1604, 479, 1013, 1014, 481, 4313, 1499, 1016, 4073, 1777, 2172, 485, 4274, 4599, 4796, 487, 4710, 1775, 4205, 1526, 1697, 2000, 488, 1894, 1882, 1817, 1880, 490, 1018, 3917, 3616, 4311, 1800, 4473, 4085, 4401, 3783, 3765, 1538, 3870, 491, 3699, 3792, 4290, 2074, 492, 494, 2421, 4090, 2012, 1803, 3642, 1322, 1020, 502, 1333, 504, 4805, 1890, 507, 3608, 1732, 511, 2397, 1864, 1816, 1531, 513, 3636, 514, 1699, 1027, 4987, 1366, 4664, 4950, 4027, 3478, 2959, 1293, 3197, 1595, 3413, 518, 4698, 1032, 1033, 1675, 1797, 4578, 4854, 2315, 521, 1999, 3759, 1215, 4122, 1730, 3966, 1035, 4973, 528, 3911, 3289, 1821, 530, 2426, 532, 1874, 533, 1038, 538, 539, 3767, 1929, 3683, 2100, 4853, 1338, 2021, 1616, 1901, 1796, 1517, 4331, 4332, 4466, 2719, 4123, 4233, 1824, 3129, 3087, 3505, 4158, 4254, 3720, 4351, 4414, 3453, 3254, 1649, 544, 4240, 3580, 1046, 548, 549, 2598, 552, 553, 3819, 1259, 4062, 554, 2841, 3515, 1433, 1323, 4301, 555, 558, 3738, 1567, 559, 1054, 1270, 3857, 2175, 1257, 1238, 3662, 561, 1058, 563, 4872, 2097, 1061, 4203, 1899, 3981, 1062, 1303, 4116, 570, 1946, 3620, 1514, 4002, 3679, 3964, 3707, 3666, 1348, 4273, 1804, 4497, 571, 1401, 4438, 1895, 1264, 1912, 573, 3939, 4170, 4056, 1271, 1521, 1221, 1451, 3934, 4080, 4352, 1700, 3739, 1419, 1811, 3950, 1690, 3716, 1569, 1437, 1674, 4337, 1285, 4268, 1183, 3881, 3938, 4198, 4416, 4229, 4292, 4193, 4325, 4375, 4432, 4215, 3944, 1409, 4195, 4223, 1540, 4455, 4512, 1723, 3750, 4070, 4104, 4235, 1863, 4346, 1881, 1071, 1814, 4443, 3761, 1346, 1587, 3592, 576, 4469, 1275, 1950, 4129, 1296, 1551, 3733, 4111, 3993, 4108, 3949, 1287, 1713, 1556, 1736, 1995, 1705, 1861, 4120, 4417, 1292, 1785, 1236, 4293, 1827, 3839, 3983, 4395, 1957, 3928, 4295, 3715, 3855, 3609, 4076, 4175, 3927, 1757, 4299, 1773, 1364, 1462, 4007, 3729, 3665, 3722, 1691, 1712, 1624, 1751, 1394, 3924, 3952, 581, 2003, 1559, 1250, 1555, 4114, 1818, 1076, 4448, 1078, 1786, 3354, 1832, 3432, 2891, 4583, 1903, 1080, 4459, 589, 1563, 1084, 591, 592, 594, 595, 1858, 596, 598, 1453, 2559, 2590, 2738, 4478, 4069, 1809, 1327, 4150, 3260, 3481, 3672, 3625, 4439, 3852, 3997, 3847, 4050, 3377, 4424, 4143, 4493, 3492, 1412, 601, 4017, 4477, 1794, 602, 4263, 3072, 2009, 1754, 1088, 3888, 603, 604, 1368, 3827, 4103, 1571, 1438, 2069, 611, 1093, 612, 1094, 3701, 4389, 614, 5000, 615, 1332, 1715, 4369, 1652, 1541, 1921, 1733, 1373, 1870, 619, 4218, 1798, 1702, 1384, 3700, 1788, 1600, 624, 2473, 1423, 2771, 1339, 3875, 3070, 2015, 2557, 2795, 2906, 2103, 3299, 3118, 4838, 4965, 4605, 4576, 1103, 1614, 1947, 631, 4479, 3766, 1107, 635, 1813, 636, 2431, 637, 1109, 4577, 639, 3706, 1110, 640, 1111, 4581, 4644, 4734, 642, 3735, 3390, 1694, 3431, 2838, 3483, 3464, 3848, 2558, 3314, 3086, 3029, 2956, 3517, 2651, 2914, 2680, 2632, 3121, 3100, 3528, 3526, 3084, 4220, 3304, 2846, 1186, 3235, 2903, 3559, 2687, 3409, 3237, 2900, 2999, 3349, 3171, 2752, 3262, 3504, 3047, 3193, 3430, 2525, 2670, 2911, 3508, 2776, 2697, 3200, 2790, 3323, 2543, 2874, 2614, 3904, 3373, 3054, 2617, 4242, 3621, 2708, 4179, 4398, 3959, 1269, 3095, 1286, 3624, 4481, 3511, 2735, 4381, 3295, 1585, 1568, 1766, 3221, 2643, 2739, 4629, 3920, 4603, 2307, 647, 1801, 4279, 3762, 1637, 1509, 4590, 648, 1117, 4800, 4724, 4674, 1119, 2965, 2695, 3293, 4722, 1121, 4784, 653, 1122, 3264, 655, 656, 657, 4035, 2910, 3391, 2808, 3099, 2913, 3676, 2852, 3284, 2731, 3537, 3994, 1319, 4467, 1623, 660, 4714, 4812, 1123, 664, 2138, 1126, 1128, 1129, 1130, 670, 1527, 671, 1772, 1133, 2196, 1136, 1137, 5005, 1933, 1731, 1793, 3342, 1140, 1141, 4525, 687, 3822, 1601, 1148, 693, 3905, 694, 1414, 1149, 4756, 4859, 2258, 697, 1795, 1372, 1695, 1866, 1151, 4115, 1719, 2194, 1920, 4999, 1544, 703, 4031, 4305, 1636, 1393, 3810, 4452, 3677, 4227, 4402, 4157, 4197, 1337, 1253, 1532, 4028, 3989, 4715, 704, 1493, 1902, 1152, 4824, 4182, 707, 708, 709, 4732, 4476, 1375, 713, 714, 715, 1841, 4234, 1154, 1314, 4096, 4895, 718, 719, 720, 2063, 1311, 721, 4903, 4885, 4217, 1627, 2116, 1158, 724, 5013, 4894, 1953, 1201, 3787, 729, 2485, 3747, 730, 1846, 3815, 1964, 1822, 1262, 4480, 1537, 1291, 1318, 4976, 4294, 1582, 4587, 3439, 2833, 4287, 4509, 4505, 4267, 3697, 3272, 4112, 2967, 3651, 1805, 3705, 1195, 3859, 1164, 1165, 2351, 4835, 4571, 2423, 1745, 1973, 1168, 3807, 4307, 1169, 1454, or 1781.

[0214] A VP capsid polypeptide may have a 581 to 589 region having a sequence of SEQ ID NO: 5014, wherein X³ of SEQ ID NO: 5014 is a basic amino acid residue and X⁶ of SEQ ID NO: 5014 is a basic amino acid residue. In some embodiments, the 581 to 589 region has a sequence of any one of SEQ ID NOs: 4177, 1289, 740, 3477, 1548, 3051, 2982, 2877, 3036, 3426, 3073, 3169, 747, 3362, 2784, 21, 3192, 1638, 748, 1703, 1836, 3660, 29, 750, 1640, 33, 35, 36, 1205, 3795, 753, 4288, 4219, 2770, 2962, 4241, 4107, 2718, 3317, 4391, 3263, 2553, 3947, 2710, 2608, 3467, 2796, 2961, 2529, 3320, 2674, 2635, 3446, 3053, 3250, 3688, 1998, 4320, 3351, 2655, 3514, 2779, 3194, 3319, 3224, 3281, 3708, 2807, 3562, 3274, 3374, 3013, 3416, 2981, 3065, 2777, 3469, 2977, 2638, 2972, 3059, 2574, 3380, 4262, 3167, 3368, 2781, 3547, 3386, 1225, 2960, 3485, 3370, 3443, 2824, 3327, 3178, 3006, 3252, 2991, 3470, 2888, 2572, 3418, 2642, 2519, 3363, 40, 2633, 45, 756, 48, 1952, 3122, 2551, 3718, 3484, 3577, 759, 3960, 1378, 2994, 3080, 2589, 3681, 760, 762, 3925, 3654, 60, 4086, 1740, 1660, 62, 1966, 63, 768, 66, 67, 68, 3816, 2599, 2706, 74, 3865, 1549, 1361, 2453, 3882, 3713, 1942, 1312, 4501, 76, 1560, 4289, 3757, 3593, 3908, 4397, 4415, 3723, 3754, 4360, 3945, 2854, 3523, 3669, 4065, 1294, 1484, 3891, 4456, 4040, 4496, 1982, 2001, 1478, 1189, 1490, 1885, 1926, 89, 1180, 92, 786, 94, 95, 1831, 1867, 4458, 97, 1970, 1936, 1590, 99, 789, 790, 1298, 101, 1688, 791, 792, 2007, 103, 104, 105, 108, 1579, 110, 1906, 1444, 1344, 116, 802, 117, 118, 121, 803, 1463, 124, 807, 133, 1978, 812, 135, 136, 137, 138, 140, 1326, 141, 142, 143, 1634, 1302, 817, 818, 147, 148, 149, 151, 154, 155, 819, 820, 157, 165, 822, 168, 169, 170, 823, 1651, 173, 1483, 174, 825, 176, 180, 827, 181, 828, 184, 185, 186, 188, 189, 830, 192, 193, 194, 196, 1391, 197, 200, 201, 202, 203, 205, 832, 206, 834, 835, 836, 1334, 3901, 3312, 2649, 1450, 4386, 3028, 1446, 215, 1522, 3490, 217, 219, 1612, 220, 221, 222, 839, 223, 840, 224, 230, 231, 842, 232, 233, 235, 851, 853, 1536, 240, 242, 243, 244, 245, 246, 247, 250, 251, 254, 255, 857, 256, 258, 259, 859, 260, 861, 862, 2326, 264, 1241, 266, 1477, 867, 869, 870, 271, 871, 872, 272, 1252, 1591, 275, 1980, 276, 876, 877, 277, 278, 1892, 1539, 3601, 3877, 1930, 1460, 282, 1799, 1626, 1374, 1620, 1290, 1354, 1956, 889, 292, 4324, 4138, 891, 3903, 297, 3829, 3809, 4271, 3844, 1436, 1617, 1961, 304, 1589, 4370, 3646, 4059, 1431, 1331, 312, 1779, 313, 896, 1558, 1552, 322, 1958, 324, 901, 1491, 329, 330, 4484, 1756, 3536, 2701, 2799, 3332, 3294, 3159, 3069, 2637, 3025, 2782, 3247, 3350, 2692, 2586, 3004, 3049, 2694, 2650, 3554, 2983, 3403, 3214, 3163, 2541, 3090, 3097, 3462, 1430, 2941, 3486, 2842, 3558, 3104, 3037, 3419, 2780, 2931, 1276, 2928, 2609, 3068, 3128, 2548, 2538, 2618, 2789, 3228, 2657, 3189, 2863, 3307, 3300, 2546, 3048, 3543, 2946, 2975, 3346, 3067, 2728, 2955, 3408, 3027, 3094, 3203, 2988, 2751, 2953, 2566, 2578, 2823, 3063, 3335, 3000, 3181, 3011, 3138, 3389, 2805, 3074, 2894, 3149, 2560, 3417, 3265, 3378, 2901, 2837, 2822, 2745, 3473, 3530, 3040, 2597, 3509, 3522, 3161, 2926, 3209, 3105, 3400, 2630, 2905, 2671, 2818, 2806, 2702, 2709, 3549, 3538, 2534, 2773, 2623, 3491, 3243, 3136, 2693, 3164, 3343, 2918, 2555, 2794, 2679, 3510, 3110, 2672, 3442, 2929, 3184, 3488, 3093, 2996, 3141, 3544, 3102, 2856, 2957, 3466, 3461, 2788, 2660, 3344, 3204, 2720, 3379, 2826, 1789, 2785, 3249, 3527, 4460, 3352, 2569, 4457, 2011, 4319, 3906, 1533, 1755, 4248, 1557, 1602, 4188, 1330, 4349, 3337, 3533, 2629, 3038, 2539, 3567, 3291, 3348, 3115, 3359, 2993, 3079, 3506, 2527, 2963, 2938, 2516, 3113, 2639, 3143, 3044, 2747, 3154, 3280, 3039, 2743, 2902, 3056, 2554, 2522, 3103, 3210, 3434, 2656, 4251, 4196, 3206, 3328, 2588, 3553, 2714, 3078, 3222, 3137, 3357, 2717, 2944, 3012, 3220, 3202, 2811, 3083, 3269, 3566, 2699, 2515, 3023, 2533, 3288, 3075, 3005, 2685, 3058, 2976, 2622, 3333, 3463, 2939, 3521, 3268, 3117, 2626, 2616, 3240, 2570, 3565, 2919, 3157, 2849, 3444, 2631, 3420, 2659, 3325, 3186, 2920, 3258, 3440, 3457, 3310, 2761, 3134, 2621, 3531, 2711, 2774, 2867, 2585, 3155, 2620, 3156, 2844, 3126, 3160, 2909, 3542, 3225, 2887, 3474, 3218, 2744, 2896, 3135, 3424, 3498, 3529, 2661, 2667, 2549, 2819, 2768, 2935, 3182, 2772, 3230, 3043, 2922, 3581, 2869, 2610, 3298, 2775, 3108, 2603, 2612, 2860, 3187, 3238, 3786, 4385, 3016, 3436, 2876, 2987, 3532, 3438, 3561, 3259, 2663, 2890, 3433, 3071, 3018, 2580, 2755, 3015, 2540, 3398, 2664, 2583, 2830, 2644, 2641, 3513, 2725, 2723, 3338, 3556, 2866, 2514, 2932, 2753, 2862, 2899, 2605, 2989, 3096, 3124, 2985, 2716, 3145, 3017, 2591, 2640, 3033, 3216, 3316, 3412, 2971, 3256, 3153, 3575, 3339, 2915, 2531, 3552, 3475, 3060, 3375, 2756, 3382, 2847, 2859, 3251, 3702, 3423, 2537, 2801, 3076, 2696, 3092, 3459, 3144, 3441, 2802, 3479, 2907, 3512, 3518, 3021, 2871, 3032, 2647, 2945, 3045, 2763, 3313, 3034, 3315, 3541, 2746, 2669, 2524, 3003, 2732, 3166, 3046, 3306, 2873, 3364, 3253, 3215, 3061, 2804, 2722, 2964, 2990, 2836, 3173, 2762, 3737, 2628, 3507, 2564, 3031, 2872, 3360, 2658, 2930, 2904, 3244, 3217, 3311, 3445, 2840, 3372, 2958, 3098, 3356, 3456, 3388, 2624, 3207, 2576, 2742, 2665, 2815, 3052, 3421, 2593, 3242, 2535, 2966, 2898, 2858, 2943, 2668, 2798, 3196, 2528, 2713, 3001, 2691, 2948, 2767, 2544, 3302, 2734, 2893, 2592, 2861, 3502, 2969, 2582, 3229, 2676, 2545, 3255, 3330, 2547, 3257, 2882, 3151, 3088, 2883, 3318, 2645, 2733, 2587, 3500, 3008, 2715, 2845, 3183, 2654, 3233, 3267, 2741, 2827, 2704, 3091, 2832, 2736, 3177, 3271, 2835, 2908, 3176, 2947, 3292, 3191, 2517, 3026, 3082, 3392, 3381, 2584, 2712, 3213, 3451, 2634, 3150, 2810, 3303, 2573, 3460, 2615, 3394, 2828, 3329, 4377, 4499, 3555, 2974, 3629, 3578, 3885, 2817, 3248, 2954, 3334, 3571, 3345, 3551, 3384, 3422, 2530, 2973, 4418, 4081, 3951, 1764, 1671, 1843, 3449, 3185, 3399, 2786, 3055, 3472, 3397, 2601, 3564, 3277, 4373, 3548, 3179, 3407, 3841, 3347, 3142, 4431, 3241, 3077, 2700, 3147, 2648, 3283, 2829, 3278, 2581, 2536, 4363, 2848, 3410, 2797, 2523, 2520, 2721, 3496, 2571, 3198, 3219, 3030, 2673, 2921, 3301, 3322, 2705, 3239, 2949, 3369, 3396, 2892, 2897, 2766, 3174, 3297, 2550, 2889, 2933, 2793, 2627, 2677, 3119, 2596, 3226, 3172, 3089, 2868, 2839, 3120, 3286, 2843, 3465, 3946, 4222, 2682, 2865, 3539, 3168, 2864, 3308, 3557, 2940, 3109, 3503, 2625, 3455, 3114, 2595, 3331, 2978, 2518, 2521, 4079, 3024, 3573, 2952, 2653, 3180, 2813, 2652, 2600, 2816, 3201, 3188, 3270, 2997, 2992, 3009, 3520, 2936, 3275, 3165, 3447, 3131, 3305, 2809, 2792, 2729, 2814, 2619, 3266, 2825, 3066, 2857, 2998, 3064, 2681, 3035, 3279, 2764, 3480, 3127, 2912, 3010, 2607, 3211, 3111, 3041, 4269, 3487, 3489, 3019, 1266, 3435, 3482, 3020, 2748, 2646, 2787, 2760, 2563, 3085, 3133, 3158, 3170, 2703, 3494, 2552, 3395, 3245, 3404, 2675, 2791, 1911, 908, 1935, 2749, 3341, 3355, 2575, 2942, 2886, 2758, 2594, 3495, 2884, 3516, 3042, 2737, 2923, 3563, 2855, 3476, 2611, 2937, 3383, 3497, 3402, 3162, 2662, 2875, 3223, 2878, 1808, 3285, 2757, 3057, 2951, 3519, 2579, 2853, 3387, 3401, 3493, 3393, 1608, 3365, 2885, 3574, 3081, 3007, 3568, 3152, 3367, 3358, 336, 3468, 3290, 3550, 3132, 2726, 2879, 3190, 3309, 2613, 2765, 3106, 1355, 3454, 2851, 2881, 3232, 3458, 3326, 3353, 2927, 3212, 2950, 3376, 3208, 3062, 3612, 3195, 3385, 2686, 2602, 3569, 3123, 2727, 1622, 2821, 2636, 2750, 2850, 3050, 2925, 3336, 3540, 2689, 3139, 2526, 3361, 3022, 3427, 3107, 3140, 3371, 3276, 2831, 3501, 2924, 3366, 3199, 3101, 3321, 3499, 2917, 2683, 2800, 2812, 3340, 3227, 3148, 3657, 4446, 1746, 1464, 1886, 2666, 3246, 3130, 3560, 3236, 2730, 3572, 3689, 2968, 1457, 3450, 2577, 2567, 2532, 3415, 2934, 2984, 2568, 4147, 3002, 2986, 2979, 2542, 1762, 4472, 1529, 4057, 1976, 4507, 1583, 1711, 2013, 1594, 4440, 344, 921, 4498, 3728, 3637, 3570, 3429, 4091, 2870, 2995, 4338, 3205, 2880, 3261, 3968, 4291, 4204, 4071, 4034, 1742, 2820, 3912, 3287, 4145, 354, 1782, 927, 3610, 4224, 1918, 1959, 3736, 1770, 931, 4155, 364, 1279, 365, 1543, 367, 4049, 1633, 1722, 369, 1495, 1566, 1211, 1748, 4142, 1434, 1358, 1191, 3732, 4110, 4039, 4411, 4506, 4156, 4036, 4030, 4016, 3899, 1247, 1855, 3919, 1244, 4140, 3930, 4117, 4189, 4001, 3643, 3619, 1240, 1575, 3871, 4135, 4408, 3604, 1274, 3741, 1938, 3709, 3622, 3834, 1983, 1743, 3979, 4461, 4113, 3817, 4232, 4214, 1219, 1486, 1512, 1516, 4047, 4082, 4094, 1574, 1248, 4078, 1872, 1426, 3785, 3687, 4318, 4243, 3866, 3704, 4172, 1513, 1856, 3324, 2769, 2678, 1561, 3296, 377, 1395, 4093, 4453, 3778, 4210, 4009, 4264, 4339, 1738, 4194, 4474, 4013, 4266, 1771, 3860, 3832, 1349, 1381, 3663, 1185, 3932, 3858, 1198, 4192, 3611, 1919, 3790, 3712, 4095, 1887, 4468, 1720, 4247, 2002, 1657, 1336, 3894, 1554, 3576, 4314, 3695, 4362, 1815, 3656, 3638, 4454, 1443, 1661, 1359, 3650, 1648, 3831, 4435, 4451, 1993, 3849, 1718, 4068, 1835, 1425, 1428, 4380, 1658, 1452, 4024, 4072, 3791, 4491, 4323, 4014, 1304, 1511, 1981, 1676, 4422, 3748, 4119, 1297, 1299, 4450, 3990, 4029, 3711, 4344, 1578, 4384, 3892, 3674, 3595, 4405, 3973, 4109, 4159, 3744, 4387, 1960, 4275, 4492, 4365, 4118, 3655, 3886, 4278, 3751, 3678, 4353, 3175, 2970, 1228, 3534, 3437, 3406, 3641, 3639, 4470, 3941, 4348, 3587, 3818, 3814, 4350, 3821, 3929, 3824, 4465, 4494, 1398, 3828, 1284, 3773, 4209, 3014, 3884, 2783, 4038, 3545, 2916, 3112, 2834, 3880, 4399, 4048, 3752, 4207, 1235, 3943, 4355, 4087, 4100, 4163, 4486, 4178, 1643, 4152, 3634, 4445, 4303, 4284, 1213, 4382, 1399, 3714, 4487, 3615, 4018, 4420, 4121, 3724, 4282, 4310, 4488, 4127, 3670, 4052, 4124, 4508, 4500, 3652, 3972, 1309, 1528, 3717, 1217, 2740, 3125, 3546, 3842, 4404, 3690, 3962, 4329, 4410, 3703, 4136, 3589, 3907, 4153, 2707, 4180, 3923, 4444, 4361, 4394, 4302, 3758, 4510, 3742, 1710, 1335, 1997, 1701, 4280, 4006, 1984, 3833, 1593, 2561, 4442, 3900, 4298, 1761, 4388, 1597, 4317, 4249, 1341, 1680, 4441, 3628, 3725, 1945, 937, 4206, 1588, 1439, 3794, 4447, 3776, 3658, 4064, 4011, 4272, 4503, 1367, 3594, 3680, 1300, 1750, 3913, 3774, 1877, 1987, 3998, 1380, 4185, 3686, 3696, 4463, 3853, 4244, 4083, 1909, 3897, 1546, 3613, 3273, 3452, 3525, 1229, 3835, 1234, 3970, 3856, 3586, 1175, 4321, 2778, 4412, 4407, 1810, 3823, 1427, 1507, 1878, 4333, 3146, 4281, 4211, 1179, 3843, 1677, 1524, 1525, 1974, 1239, 4167, 3740, 1342, 4125, 1580, 4060, 1576, 1212, 3921, 1174, 4061, 4021, 3693, 3734, 1382, 3684, 3806, 3635, 3976, 3840, 4286, 3836, 4161, 3659, 3743, 3605, 4392, 4328, 1316, 4173, 4265, 1246, 1629, 1829, 1837, 1914, 1839, 3984, 3910, 4160, 4184, 4132, 4250, 1562, 1847, 1792, 3769, 1534, 4003, 1689, 1599, 1265, 1655, 3874, 4261, 3626, 3579, 1644, 3936, 4054, 4260, 4297, 4357, 4022, 4046, 1222, 1996, 3788, 3953, 4226, 4277, 4101, 3797, 4019, 3771, 3632, 1402, 4137, 3772, 3661, 4186, 4174, 1170, 3850, 1315, 1611, 4033, 3623, 3596, 1461, 1848, 1173, 1928, 1765, 3719, 3584, 3591, 4165, 4191, 3980, 4058, 4200, 4336, 3958, 1260, 4051, 3798, 4032, 1774, 4322, 3991, 4106, 3978, 3965, 4464, 3813, 4154, 1365, 3846, 4345, 4379, 3603, 1693, 3937, 3801, 1787, 1214, 4483, 4201, 1898, 1220, 4245, 1347, 3867, 1900, 3640, 3916, 4089, 3745, 3975, 4256, 4308, 4000, 3868, 4403, 3883, 4326, 4393, 3895, 4237, 3955, 4005, 4092, 4372, 4283, 3805, 4151, 3982, 3597, 3872, 3987, 4490, 3876, 3668, 4300, 1679, 1242, 3598, 3583, 3647, 4304, 3779, 1907, 4042, 3648, 3996, 3800, 4367, 4099, 1807, 3887, 4428, 1625, 1390, 1884, 1682, 4364, 4306, 3869, 1278, 942, 1505, 1542, 1709, 3600, 3914, 3948, 1865, 1716, 3961, 1506, 4221, 1376, 1683, 4276, 1721, 1632, 3607, 1455, 1913, 1497, 1317, 1951, 1778, 3768, 4225, 1668, 390, 4406, 4341, 1480, 1714, 1422, 397, 3618, 4433, 1177, 3898, 398, 950, 400, 1965, 4471, 403, 1482, 3602, 4434, 3721, 1592, 1519, 1352, 4409, 1977, 1631, 1684, 409, 3889, 414, 415, 961, 1905, 416, 963, 3675, 1833, 3974, 965, 970, 1897, 4133, 3830, 972, 424, 427, 1708, 4141, 3749, 1619, 975, 4044, 3590, 1944, 4126, 1923, 1706, 4400, 1606, 2604, 2895, 436, 3448, 1692, 3862, 4055, 4358, 985, 1664, 4045, 3854, 3682, 1972, 2688, 4366, 3425, 3231, 3649, 2759, 2724, 3755, 1216, 3599, 3775, 2754, 2606, 3471, 3234, 2565, 2803, 2562, 2684, 3411, 3405, 2690, 1255, 3694, 3535, 1306, 4084, 3282, 1780, 990, 991, 992, 1728, 994, 1696, 998, 3116, 1869, 456, 1386, 3879, 2698, 1001, 461, 1447, 464, 4425, 1231, 1468, 476, 1273, 1744, 1488, 1659, 1604, 481, 4313, 1499, 1016, 4073, 1777, 4274, 487, 1775, 4205, 1526, 1697, 2000, 1882, 1817, 1880, 490, 1018, 3917, 3616, 4311, 1800, 4473, 4085, 4401, 3783, 3765, 491, 3699, 3792, 4290, 4090, 2012, 1803, 3642, 1322, 502, 1333, 1890, 3608, 1732, 511, 2397, 1864, 1816, 1531, 3636, 1699, 1027, 1366, 4027, 3478, 2959, 3197, 1595, 3413, 518, 1675, 1797, 2315, 1999, 3759, 1215, 4122, 1730, 3966, 3911, 3289, 1821, 530, 1874, 1038, 3767, 1929, 3683, 1338, 1517, 4331, 4332, 4466, 2719, 4123, 4233, 1824, 3129, 3087, 3505, 4158, 4254, 3720, 4351, 4414, 3453, 3254, 1649, 544, 4240, 3580, 1046, 2598, 552, 3819, 1259, 4062, 2841, 3515, 4301, 3738, 1567, 1270, 3857, 1257, 1238, 3662, 561, 1058, 1061, 4203, 1899, 3981, 1062, 1303, 4116, 1946, 3620, 1514, 4002, 3679, 3964, 3707, 3666, 1348, 4273, 1804, 4497, 1401, 4438, 1895, 1264, 1912, 3939, 4170, 4056, 1271, 1521, 1221, 1451, 3934, 4080, 4352, 1700, 3739, 1419, 1811, 3950, 1690, 3716, 1437, 1674, 4337, 1285, 4268, 1183, 3881, 3938, 4198, 4416, 4229, 4292, 4193, 4325, 4375, 4432, 4215, 3944, 1409, 4195, 4223, 1540, 1723, 3750, 4070, 4104, 4235, 1863, 4346, 1881, 1814, 4443, 3761, 1346, 1587, 3592, 576, 4469, 1275, 1950, 4129, 1296, 1551, 3733, 4111, 3993, 4108, 3949, 1287, 1713, 1736, 1995, 1705, 1861, 4120, 4417, 1785, 1236, 4293, 3839, 3983, 4395, 1957, 3928, 4295, 3715, 3855, 3609, 4076, 4175, 3927, 1757, 4299, 1773, 1364, 1462, 4007, 3729, 3665, 3722, 1691, 1624, 1751, 1394, 3924, 3952, 581, 2003, 1559, 1250, 1555, 4114, 1818, 1076, 4448, 1078, 1786, 3354, 1832, 3432, 2891, 1903, 4459, 1563, 591, 594, 598, 1453, 2559, 2590, 2738, 4478, 4069, 1809, 1327, 4150, 3260, 3481, 3672, 3625, 4439, 3852, 3997, 3847, 4050, 3377, 4424, 4143, 4493, 3492, 601, 4017, 4477, 1794, 4263, 3072, 2009, 1754, 1088, 3888, 1368, 3827, 4103, 1571, 1438, 1093, 612, 1094, 3701, 4389, 1332, 1715, 4369, 1652, 1541, 1921, 1733, 1373, 1870, 619, 4218, 1798, 1702, 1384, 3700, 1788, 1600, 624, 2771, 1339, 3875, 3070, 2557, 2795, 2906, 3118, 1614, 1947, 4479, 3766, 635, 1813, 636, 3706, 1110, 640, 1111, 642, 1694, 3431, 2838, 3483, 3464, 3848, 2558, 3314, 3086, 3029, 2956, 3517, 2651, 2914, 2680, 2632, 3121, 3100, 3528, 3526, 3084, 4220, 3304, 2846, 1186, 3235, 2903, 3559, 2687, 3409, 3237, 2900, 2999, 3349, 3171, 2752, 3262, 3504, 3047, 3193, 3430, 2525, 2670, 2911, 3508, 2776, 2697, 3200, 2790, 3323, 2543, 2874, 2614, 3904, 3373, 3054, 2617, 4242, 3621, 2708, 4179, 4398, 3959, 3095, 1286, 3624, 4481, 3511, 2735, 4381, 3295, 1585, 1766, 3221, 2643, 2739, 3920, 2307, 647, 1801, 4279, 3762, 1637, 1509, 1119, 2965, 2695, 3293, 1121, 1122, 3264, 655, 4035, 2910, 3391, 2808, 3099, 2913, 3676, 2852, 3284, 2731, 3994, 1319, 4467, 1623, 664, 1128, 1129, 1130, 670, 1527, 671, 1772, 5005, 1933, 1731, 1793, 3342, 3822, 1601, 3905, 694, 1414, 1795, 1372, 1695, 1866, 4115, 1719, 1920, 1544, 703, 4031, 4305, 1636, 1393, 3810, 4452, 3677, 4227, 4402, 4157, 4197, 1337, 1253, 1532, 4028, 3989, 1493, 1902, 4182, 707, 708, 4476, 714, 1841, 4234, 1314, 4096, 4217, 1627, 1953, 1201, 3787, 3747, 730, 1846, 3815, 1964, 1822, 1262, 4480, 1537, 1291, 1318, 4294, 1582, 3439, 2833, 4287, 4509, 4505, 4267, 3697, 3272, 4112, 2967, 3651, 3705, 1195, 3859, 1164, 1165, 1745, 1973, 1168, 3807, 4307, 1454, or 1781.

[0215] A VP capsid polypeptide may have a 581 to 589 region having a sequence of SEQ ID NO: 5014, wherein X³ of SEQ ID NO: 5014 is K or R. In some embodiments, the 581 to 589 region has a sequence of any one of SEQ ID NOs: 4177, 1289, 740, 741, 18, 745, 3477, 1548, 3051, 2982, 2877, 3036, 3426, 3073, 3169, 747, 3362, 2784, 21, 3192, 23, 1638, 748, 1703, 1836, 3660, 29, 750, 1640, 33, 34, 35, 36, 37, 38, 1205, 3795, 753, 4288, 4219, 2770, 2962, 4241, 4107, 2718, 3317, 4391, 4053, 3263, 2553, 3947, 2710, 2608, 3467, 2796, 2961, 2529, 3320, 2674, 2635, 3446, 3053, 3250, 3688, 1182, 1998, 4320, 3351, 2655, 3514, 2779, 3194, 3319, 3224, 3281, 3708, 2807, 3562, 3274, 3374, 3013, 3416, 2981, 3065, 2777, 3469, 2977, 2638, 2972, 3059, 2574, 3380, 4262, 3167, 3368, 2781, 3547, 3386, 1225, 2960, 3485, 3370, 3443, 2824, 3327, 3178, 3006, 3252, 2991, 3470, 2888, 2572, 3418, 2642, 2519, 3363, 40, 2633, 41, 42, 43, 755, 45, 756, 46, 48, 1952, 758, 49, 3122, 2551, 3718, 3484, 3577, 759, 1230, 3960, 1378, 2994, 3080, 2589, 3681, 760, 53, 3925, 55, 3654, 56, 61, 4086, 1740, 1660, 765, 766, 62, 1966, 63, 64, 768, 771, 65, 66, 67, 68, 3816, 2599, 2706, 74, 3865, 1549, 1361, 3882, 3713, 1942, 1312, 4501, 76, 77, 1560, 4289, 3757, 79, 3593, 4043, 1806, 3908, 4397, 1615, 4415, 3723, 2006, 3754, 1470, 4360, 3945, 2854, 3523, 3669, 82, 4065, 83, 1294, 1484, 3891, 4456, 4040, 4496, 1982, 2001, 1478, 1189, 1490, 1885, 1926, 89, 90, 91, 779, 1180, 92, 785, 786, 94, 95, 1831, 1867, 4458, 97, 1970, 1936, 1590, 100, 789, 790, 1298, 101, 1688, 791, 792, 2007, 103, 794, 795, 104, 105, 106, 1849, 108, 1579, 110, 1906, 113, 1444, 1344, 116, 802, 117, 118, 121, 803, 804, 1463, 805, 122, 124, 125, 127, 807, 132, 809, 810, 133, 1978, 812, 135, 136, 137, 138, 813, 140, 815, 1326, 141, 142, 143, 144, 145, 1634, 1302, 817, 146, 818, 147, 148, 149, 151, 152, 153, 154, 155, 819, 820, 157, 159, 160, 163, 164, 165, 166, 822, 167, 168, 169, 170, 171, 823, 824, 1651, 173, 1483, 174, 175, 825, 176, 177, 826, 827, 181, 828, 182, 829, 184, 185, 186, 187, 188, 189, 830, 191, 192, 193, 194, 195, 196, 1391, 197, 200, 201, 202, 203, 204, 205, 832, 833, 206, 834, 836, 1334, 837, 3901, 3312, 2649, 1301, 211, 212, 1450, 4386, 3028, 213, 1446, 214, 215, 1896, 1522, 3490, 838, 217, 218, 219, 1612, 220, 221, 222, 839, 223, 840, 224, 226, 227, 230, 231, 842, 232, 233, 844, 236, 237, 851, 852, 853, 1536, 240, 854, 242, 243, 244, 245, 246, 247, 249, 250, 251, 252, 253, 254, 255, 857, 256, 257, 258, 259, 858, 859, 260, 261, 860, 861, 862, 262, 264, 1241, 265, 266, 866, 1477, 267, 867, 869, 870, 271, 871, 872, 272, 1252, 273, 1591, 275, 1980, 276, 876, 877, 277, 278, 279, 1892, 1539, 880, 1295, 3601, 3877, 1930, 1420, 1678, 1460, 282, 1799, 283, 1626, 1374, 287, 1620, 1290, 1354, 888, 291, 1956, 889, 292, 4324, 293, 4138, 891, 3903, 297, 3829, 3809, 4271, 3844, 1436, 1515, 1617, 1961, 304, 306, 1589, 4370, 308, 309, 894, 3646, 4059, 1431, 1331, 312, 895, 1779, 313, 314, 315, 316, 896, 1558, 1552, 898, 321, 322, 899, 1958, 901, 325, 902, 326, 1491, 329, 330, 905, 4484, 1756, 3536, 2701, 2799, 3332, 3294, 3159, 3069, 2637, 3025, 2782, 3247, 3350, 2692, 2586, 3004, 3049, 2694, 2650, 3554, 2983, 3403, 3214, 3163, 2541, 3090, 3097, 3462, 1430, 2941, 3486, 2842, 3558, 3104, 3037, 3419, 2780, 2931, 1276, 2928, 2609, 3068, 3128, 2548, 2538, 2618, 2789, 3228, 2657, 3189, 2863, 3307, 3300, 2546, 3048, 3543, 2946, 2975, 3346, 3067, 2728, 2955, 3408, 3027, 3094, 3203, 2988, 2751, 2953, 2566, 2578, 2823, 3063, 3335, 3000, 3181, 3011, 3138, 3389, 2805, 3074, 2894, 3149, 2560, 3417, 3265, 3378, 2901, 2837, 2822, 2745, 3473, 3530, 3040, 2597, 3509, 3522, 3161, 2926, 3209, 3105, 3400, 2630, 2905, 2671, 2818, 2806, 2702, 2709, 3549, 3538, 2534, 2773, 2623, 3491, 3243, 3136, 2693, 3164, 3343, 2918, 2555, 2794, 2679, 3510, 3110, 2672, 3442, 2929, 3184, 3488, 3093, 2996, 3141, 3544, 3102, 2856, 2957, 3466, 3461, 2788, 2660, 3344, 3204, 2720, 3379, 2826, 1789, 2785, 3249, 3527, 4460, 3352, 2569, 4457, 2011, 4319, 3906, 1533, 1755, 1888, 4248, 1557, 1404, 4188, 1330, 4349, 3337, 3533, 2629, 3038, 2539, 3567, 3291, 3348, 3115, 3359, 2993, 3079, 3506, 2527, 2963, 2938, 2516, 3113, 1345, 2639, 3143, 3044, 2747, 3154, 3280, 3039, 2743, 2902, 3056, 2554, 2522, 3103, 3210, 3434, 2656, 4251, 4166, 4196, 3206, 3328, 2588, 3553, 2714, 3078, 3222, 3137, 3357, 2717, 2944, 3012, 3220, 3202, 2811, 3083, 3269, 3566, 2699, 2515, 3023, 2533, 3288, 3075, 3005, 2685, 3058, 2976, 2622, 3333, 3463, 2939, 3521, 3268, 3117, 2626, 2616, 3240, 2570, 3565, 2919, 3157, 2849, 3444, 2631, 3420, 2659, 3325, 3186, 2920, 3258, 3440, 3457, 3310, 2761, 3134, 2621, 3531, 2711, 2774, 2867, 2585, 3155, 2620, 3156, 2844, 3126, 3160, 2909, 3542, 3225, 2887, 3474, 3218, 2744, 2896, 3135, 3424, 3498, 3529, 2661, 2667, 2549, 2819, 2768, 2935, 3182, 2772, 3230, 3043, 2922, 3581, 3524, 2869, 2610, 3298, 2775, 3108, 2603, 3614, 2612, 2860, 3187, 3238, 3786, 4385, 3016, 3436, 2876, 2987, 3532, 3438, 3561, 3259, 2663, 2890, 3433, 3071, 3018, 2580, 2755, 3015, 2540, 3398, 2664, 2583, 2830, 2644, 2641, 3513, 2725, 2723, 3338, 3556, 2866, 2514, 2932, 2753, 2862, 2899, 2605, 2989, 3096, 3124, 2985, 2716, 3145, 3017, 2591, 2640, 3033, 1853, 3216, 3316, 3412, 2971, 3256, 3153, 3575, 3339, 2915, 2531, 3552, 3475, 3060, 3375, 2756, 3382, 2847, 2859, 3251, 3702, 3423, 2537, 2801, 3076, 2696, 3092, 3459, 3144, 3441, 2802, 3479, 2907, 3512, 3518, 3021, 2871, 3032, 2647, 2945, 3045, 2763, 3313, 3034, 3315, 3541, 2746, 2669, 2524, 3003, 2732, 3166, 3046, 3306, 2873, 3364, 3253, 3215, 3061, 2804, 2722, 2964, 2990, 2836, 4098, 4449, 3173, 2762, 3737, 2628, 3507, 2564, 3031, 2872, 3360, 2658, 2930, 2904, 3244, 3217, 3311, 3445, 2840, 3372, 2958, 3098, 3356, 3456, 3388, 2624, 3207, 2576, 2742, 2665, 2815, 3052, 3421, 2593, 3242, 2535, 2966, 2898, 2858, 2943, 2668, 2798, 3196, 2528, 2713, 3001, 2691, 2948, 2767, 2544, 3302, 2734, 2893, 2592, 2861, 3502, 2969, 2582, 3229, 2676, 2545, 3255, 3330, 2547, 3257, 2882, 3151, 3088, 2883, 3318, 2645, 2733, 2587, 3500, 3008, 2715, 2845, 3183, 2654, 3233, 3267, 2741, 2827, 2704, 3091, 2832, 2736, 3177, 3271, 2835, 2908, 3176, 2947, 3292, 3191, 2517, 3026, 3082, 3392, 3381, 2584, 2712, 3213, 3451, 2634, 3150, 2810, 3303, 2573, 3460, 2615, 3394, 2828, 3329, 4377, 4499, 3555, 2974, 3782, 3629, 3578, 3885, 2817, 3248, 2954, 3334, 3571, 3345, 3551, 3384, 3422, 1357, 1844, 2530, 2973, 4418, 4081, 3951, 1764, 1671, 1843, 3449, 3185, 3399, 2786, 3055, 3472, 3397, 2601, 3564, 3277, 4373, 3548, 3179, 3407, 3841, 3347, 3142, 4255, 4431, 3241, 3077, 2700, 3147, 2648, 3283, 2829, 3278, 2581, 2536, 4363, 2848, 3410, 2797, 2523, 2520, 2721, 3496, 2571, 3198, 3219, 3030, 2673, 2921, 3837, 3301, 3322, 2705, 3239, 2949, 3369, 3396, 2892, 2897, 2766, 3174, 3297, 2550, 2889, 2933, 2793, 2627, 2677, 3119, 2596, 3226, 3172, 3089, 2868, 2839, 3942, 3120, 3286, 2843, 3465, 1564, 3946, 4222, 1504, 3999, 2682, 1875, 2865, 3539, 3168, 2864, 3308, 3557, 2940, 3109, 3503, 2625, 3455, 3114, 2595, 3331, 2978, 2518, 2521, 4079, 3024, 3573, 2952, 2653, 1769, 3180, 2813, 2652, 2600, 2816, 3201, 3188, 3270, 2997, 2992, 3009, 3520, 2936, 3275, 3165, 3447, 3131, 3305, 2809, 2792, 2729, 2814, 2619, 3266, 2825, 3066, 2857, 2998, 3064, 2681, 3035, 3279, 2764, 3480, 3127, 2912, 3010, 2607, 3211, 3111, 3041, 1573, 3909, 4269, 3487, 3489, 3019, 335, 1266, 3435, 3482, 3020, 2748, 2646, 2787, 2760, 2563, 3085, 3133, 3158, 3170, 2703, 3494, 2552, 3395, 3245, 3404, 2675, 2791, 1911, 908, 1935, 2749, 3341, 3355, 2575, 2942, 2886, 2758, 2594, 3495, 2884, 3516, 3042, 2737, 2923, 3563, 2855, 3476, 2611, 2937, 3383, 3497, 3402, 3162, 2662, 2875, 3223, 2878, 1808, 3285, 2757, 3057, 2951, 3519, 2579, 2853, 3387, 3401, 3493, 3393, 1608, 3365, 2885, 3574, 3081, 3007, 3568, 3152, 3367, 3358, 336, 3468, 3290, 3550, 3132, 2726, 2879, 3190, 3309, 2613, 2765, 3106, 1355, 3454, 2851, 2881, 3232, 3458, 3326, 3353, 2927, 3212, 2950, 3376, 3208, 3062, 3612, 3195, 3385, 2686, 2602, 3569, 3123, 2727, 1622, 2821, 2636, 2750, 2850, 3050, 2925, 3336, 3540, 2689, 3139, 2526, 3361, 3022, 3427, 3107, 3140, 3371, 3276, 2831, 3501, 2924, 3366, 3199, 3101, 3321, 3499, 2917, 2683, 2800, 2812, 3340, 3227, 3148, 3657, 4446, 1746, 1464, 1886, 2666, 3246, 3130, 3560, 3236, 2730, 3572, 1607, 3689, 2968, 1457, 1500, 909, 337, 1184, 3450, 2577, 2567, 2532, 3415, 2934, 2984, 2568, 4147, 3002, 2986, 2979, 2542, 1762, 4472, 1472, 1529, 4057, 1976, 4507, 1583, 338, 911, 1711, 340, 912, 2013, 341, 4440, 917, 344, 918, 919, 921, 922, 347, 351, 923, 924, 4498, 1518, 3728, 3637, 3570, 3429, 4091, 2870, 2995, 4338, 3205, 2880, 3261, 1994, 3968, 4291, 4204, 4071, 4034, 1742, 2820, 3912, 3287, 4145, 354, 925, 1782, 926, 927, 3610, 357, 359, 4224, 1918, 1959, 3736, 1770, 931, 4155, 364, 1279, 365, 1543, 367, 4049, 1633, 1722, 368, 369, 1495, 1566, 370, 1211, 1873, 4142, 1434, 1358, 1191, 3732, 4110, 4039, 4411, 4506, 4270, 4156, 3780, 4036, 4030, 4016, 1550, 3899, 1247, 1855, 1181, 3919, 1639, 3664, 1244, 4140, 3930, 4117, 4189, 4001, 3799, 3643, 3619, 1240, 1686, 1479, 1307, 1575, 4296, 1665, 3871, 4135, 1605, 4408, 3604, 1274, 3741, 1938, 3709, 1727, 3893, 1280, 3622, 1784, 3834, 1752, 1983, 1743, 3979, 4461, 4113, 3817, 4232, 1340, 1489, 4214, 1219, 1486, 1512, 1481, 1516, 3820, 3789, 4252, 4047, 4330, 4082, 4094, 1574, 1248, 4078, 1872, 1426, 3785, 3687, 4318, 4243, 3866, 3704, 4172, 1621, 4315, 1192, 1513, 1856, 3324, 2769, 2678, 1561, 3296, 377, 1395, 4453, 3940, 3778, 4374, 4210, 4009, 4264, 4339, 4368, 1738, 378, 1610, 4194, 4474, 4013, 4266, 1771, 3860, 3832, 1349, 1381, 3663, 1642, 1185, 4356, 3932, 1233, 4212, 3858, 1198, 4192, 3611, 1919, 1819, 3790, 3712, 1969, 4095, 1887, 4468, 1720, 4247, 2002, 1657, 1663, 1336, 3894, 1554, 1494, 1405, 3576, 4314, 3695, 1851, 4362, 1815, 3845, 4511, 3656, 3638, 1406, 1596, 4454, 1443, 1661, 1359, 1734, 3650, 1910, 1648, 3831, 4435, 1208, 1988, 4451, 1993, 1986, 3849, 1718, 4068, 1835, 1425, 1428, 1282, 4380, 1658, 1452, 1687, 4024, 379, 4072, 3791, 4491, 4323, 4014, 1304, 1440, 1511, 1981, 1676, 1547, 4422, 4450, 3990, 4029, 4097, 3890, 3796, 1389, 3711, 4344, 1578, 1476, 4343, 1202, 4413, 4384, 3808, 1647, 1475, 3892, 3674, 1739, 3926, 3595, 1943, 3756, 4405, 3973, 4109, 4159, 3744, 4387, 1960, 4275, 3781, 1535, 1210, 4492, 4365, 4118, 3655, 3886, 4278, 4383, 4485, 1392, 3751, 3931, 3986, 3678, 1249, 4353, 4208, 3710, 4238, 4213, 3969, 4436, 3175, 4128, 2970, 1228, 3534, 3437, 3406, 3641, 3639, 3954, 4335, 3995, 3582, 4475, 3784, 4470, 4010, 3802, 3941, 4427, 4396, 4348, 3587, 3818, 3864, 3956, 3863, 3731, 3814, 4067, 4354, 4350, 4334, 3821, 1932, 3929, 4171, 1258, 3824, 3631, 4465, 4494, 1320, 1398, 3828, 1204, 1223, 1284, 1685, 3773, 4209, 3014, 4462, 4246, 4190, 4312, 4023, 3760, 3753, 1178, 3884, 2783, 4038, 3545, 2916, 3112, 2834, 3880, 3673, 4102, 4399, 4048, 3752, 4207, 1235, 3943, 4355, 4087, 4100, 4327, 4037, 4163, 3918, 4486, 1243, 3933, 4178, 1662, 1643, 4152, 3634, 3617, 4445, 4303, 1370, 3838, 4199, 4284, 1213, 4382, 1399, 1187, 3714, 1828, 4487, 3615, 1842, 1501, 3746, 4018, 4420, 3606, 4121, 3724, 3935, 1941, 4419, 4282, 1955, 1949, 4310, 4488, 1577, 4127, 1288, 1171, 3670, 4052, 1860, 4124, 4508, 4500, 3652, 3972, 1309, 1630, 1528, 3717, 1217, 3692, 4430, 3764, 4316, 4285, 3645, 3971, 4421, 1172, 4026, 2740, 3125, 3546, 1725, 1206, 3842, 4404, 3690, 3962, 4513, 4340, 4329, 4410, 3703, 4136, 1763, 1487, 3589, 3907, 4153, 2707, 3730, 4426, 4180, 4041, 3923, 4444, 3851, 4429, 4361, 1441, 4394, 4302, 3758, 4510, 3742, 1868, 4077, 1710, 1939, 1335, 1997, 1975, 1701, 4280, 1613, 4006, 1984, 1351, 3653, 3833, 1593, 2561, 4442, 3900, 4298, 1761, 4388, 1820, 1597, 4317, 4249, 1341, 1680, 4441, 3628, 3725, 1945, 4206, 1588, 1439, 3794, 4447, 1838, 3776, 3658, 4064, 1377, 4011, 4272, 4503, 1367, 3594, 3680, 1300, 1750, 3913, 3774, 1877, 1987, 1862, 3998, 1380, 4185, 3686, 3696, 4463, 1350, 4008, 4230, 3853, 4244, 4083, 381, 1909, 3897, 1546, 3613, 3273, 3452, 3525, 1229, 4105, 3835, 383, 1234, 3970, 1492, 3856, 3586, 1175, 4321, 4020, 4144, 1224, 1199, 3667, 2778, 4412, 4407, 1812, 1810, 3823, 1416, 1427, 1507, 1878, 4333, 3146, 4281, 4211, 1179, 3843, 1669, 1677, 1524, 1525, 1974, 384, 1979, 1456, 1239, 4167, 3740, 1876, 1388, 1967, 1474, 385, 1342, 1508, 1580, 4060, 4378, 1576, 1212, 1893, 3921, 3585, 1174, 1396, 4061, 4015, 1207, 3698, 3825, 3922, 4021, 4181, 1598, 1916, 1429, 4502, 4231, 1321, 4390, 3693, 3734, 1382, 3684, 1747, 3806, 3896, 3635, 1768, 4025, 3976, 3840, 3963, 4286, 1502, 3836, 4161, 3659, 3743, 4130, 3605, 1385, 1783, 4392, 4328, 1316, 4173, 4265, 1246, 1985, 1629, 1829, 1737, 1837, 1914, 1839, 1834, 3984, 4495, 3910, 4160, 3671, 4184, 4132, 4250, 1503, 1237, 1523, 1417, 4063, 1562, 3977, 1971, 1707, 1847, 1792, 3769, 4074, 1534, 4239, 4003, 3915, 1689, 1776, 1599, 1265, 1655, 3874, 4261, 3626, 1791, 3579, 1644, 3936, 4054, 4260, 4359, 4131, 4297, 4357, 4022, 3770, 4046, 1222, 1996, 3788, 4169, 1925, 3953, 4228, 4226, 4277, 4101, 1889, 1369, 3797, 4088, 4019, 3771, 3632, 1402, 1520, 1767, 1466, 1194, 4137, 1908, 1927, 1758, 3772, 3661, 4186, 4174, 1170, 3850, 1315, 1611, 1530, 3596, 1461, 1848, 1173, 1928, 1459, 1765, 1826, 3719, 1931, 3584, 4004, 3591, 3967, 4168, 3957, 3878, 4165, 4191, 3980, 4058, 4200, 4336, 3958, 1260, 4051, 3798, 4032, 1774, 4322, 3991, 4106, 1641, 1570, 3978, 3965, 4464, 3813, 4154, 1365, 4257, 3846, 4345, 4379, 3603, 1693, 3937, 3801, 1787, 1214, 4483, 4201, 1898, 4245, 1347, 3867, 1900, 3640, 3916, 4089, 1209, 3745, 3988, 3975, 4236, 4075, 4146, 4256, 4308, 4000, 4148, 3588, 3868, 4403, 3883, 4326, 4393, 3895, 4237, 3955, 3727, 4005, 4092, 4372, 4283, 1553, 3805, 4151, 1281, 1681, 4489, 3982, 4437, 3597, 4342, 3872, 3987, 4490, 3876, 3668, 4300, 1679, 1242, 3598, 3583, 3647, 389, 4304, 3793, 3779, 1937, 1907, 4042, 3648, 3996, 3800, 4367, 4099, 1807, 3887, 4428, 1625, 1390, 1884, 1682, 4364, 4306, 3869, 1278, 1672, 942, 1505, 1542, 1709, 1915, 3600, 3914, 1968, 3948, 1670, 3811, 1865, 1362, 1716, 3961, 1506, 4221, 1376, 1683, 4276, 1445, 1721, 1632, 3607, 1328, 1455, 1913, 1497, 1317, 1951, 1778, 1379, 3768, 4225, 1668, 390, 391, 4406, 4341, 1480, 395, 1714, 1422, 396, 397, 3618, 4433, 1177, 3898, 398, 949, 950, 399, 951, 400, 1965, 4471, 952, 402, 2475, 403, 404, 4139, 1482, 3602, 4434, 3721, 1592, 1519, 1352, 4202, 4409, 1977, 1917, 407, 408, 1631, 1684, 409, 3889, 958, 959, 412, 960, 414, 415, 961, 1905, 416, 963, 417, 3675, 1833, 3974, 420, 421, 965, 966, 969, 970, 422, 1897, 423, 4133, 3830, 972, 424, 973, 427, 1708, 4141, 3749, 431, 1619, 975, 4044, 3590, 1944, 4126, 1923, 1706, 4400, 434, 1606, 979, 2604, 2895, 436, 3448, 1692, 983, 3862, 4055, 4358, 984, 985, 1664, 445, 1972, 2688, 4366, 3425, 3231, 3649, 2759, 2724, 3873, 3755, 1216, 3599, 3775, 2754, 2606, 3471, 3234, 2565, 2803, 2562, 2684, 3411, 3405, 2690, 1255, 3694, 3535, 1306, 4084, 3282, 1780, 987, 988, 990, 451, 452, 991, 992, 1728, 994, 995, 454, 1696, 3116, 1869, 456, 1386, 999, 3879, 2698, 1001, 461, 1447, 462, 464, 4425, 1645, 1231, 1468, 472, 473, 476, 1273, 1007, 1744, 1488, 1659, 477, 1604, 481, 4313, 482, 483, 1499, 484, 1016, 4073, 1777, 1458, 4274, 487, 1775, 4205, 1526, 1697, 1017, 2000, 489, 3917, 3616, 4311, 1800, 4473, 4085, 4401, 1310, 3783, 3765, 491, 1948, 3699, 1735, 3792, 4290, 495, 4090, 496, 2012, 1803, 3642, 1322, 498, 1021, 1022, 502, 1333, 503, 1023, 1890, 510, 1026, 3608, 1732, 511, 2397, 1864, 1816, 1531, 3636, 1699, 1027, 1029, 1366, 2112, 1261, 4027, 3478, 3763, 2959, 517, 3197, 1595, 3413, 1448, 518, 1675, 1797, 520, 1999, 3759, 1215, 4122, 1730, 524, 526, 3966, 3911, 529, 3289, 1821, 530, 531, 1874, 1038, 536, 537, 3767, 1929, 1041, 1042, 3683, 542, 1338, 4331, 4332, 4466, 2719, 3803, 4123, 4233, 1824, 3129, 3087, 3505, 4158, 4254, 1449, 3720, 4351, 4414, 1673, 3453, 3254, 1649, 546, 4240, 3580, 1046, 1047, 550, 2598, 551, 552, 3819, 1259, 4062, 2841, 1050, 3515, 4301, 1052, 1053, 3738, 1567, 1270, 3857, 1055, 1257, 1238, 3662, 561, 562, 1058, 4203, 1899, 3981, 1062, 1303, 4116, 567, 1946, 3620, 1514, 4002, 3679, 3964, 3707, 3666, 1348, 4273, 1804, 4497, 1401, 4438, 1895, 1264, 572, 1912, 3939, 4170, 4056, 1271, 1065, 1521, 1221, 1451, 1654, 3934, 4080, 4352, 1700, 3739, 1565, 1419, 1811, 3950, 1690, 1397, 3716, 1437, 1674, 4337, 1285, 4268, 1183, 3726, 3881, 4134, 4347, 4012, 3938, 4066, 4198, 4416, 4164, 3630, 4229, 4292, 4193, 4325, 4375, 4371, 4432, 4215, 1753, 3944, 1409, 4195, 1729, 4223, 1540, 1723, 1070, 3750, 3633, 4070, 4104, 4162, 4235, 1863, 4346, 1881, 1814, 1572, 4443, 3761, 1346, 1587, 1072, 3592, 576, 1891, 4469, 1275, 1950, 1963, 4129, 1296, 1551, 3733, 4111, 3993, 4108, 3949, 1287, 1713, 1736, 1995, 1435, 1424, 1830, 1705, 1861, 1197, 1254, 4120, 1545, 4417, 1469, 1785, 1236, 4293, 3839, 3983, 4395, 1957, 3928, 4295, 3715, 3855, 3609, 1990, 4076, 4175, 3927, 1757, 1650, 4299, 1773, 2004, 1267, 1364, 1462, 1879, 4007, 3729, 3665, 3722, 1691, 1624, 1751, 1394, 3924, 3952, 580, 581, 2003, 1343, 1559, 1250, 1555, 4114, 1818, 1075, 1076, 1077, 1704, 4448, 1078, 1079, 1786, 585, 3354, 1832, 3432, 2891, 2505, 1903, 1081, 1082, 4459, 1083, 1563, 590, 591, 1085, 594, 1453, 2559, 2590, 2738, 4478, 4069, 1809, 1327, 4150, 3260, 3481, 3672, 3625, 2008, 4439, 3852, 3997, 1411, 599, 3847, 1268, 4050, 3377, 4424, 1496, 4143, 4493, 3492, 1962, 600, 601, 4017, 4477, 1794, 4263, 3072, 2009, 1754, 1087, 1088, 3888, 1368, 3827, 4103, 606, 1090, 1571, 1091, 1438, 1092, 1093, 612, 1094, 3701, 4389, 613, 1603, 1332, 1715, 4369, 1652, 1096, 617, 1541, 618, 1921, 1733, 1373, 1870, 619, 4218, 1798, 1100, 1702, 1101, 1667, 1384, 623, 3700, 1788, 1600, 624, 626, 2771, 627, 1339, 3875, 628, 629, 3070, 4860, 2557, 2795, 2906, 3118, 1614, 1947, 4479, 3766, 632, 1104, 1105, 633, 1813, 636, 3706, 1110, 640, 1111, 641, 642, 1694, 3431, 2838, 3483, 3464, 3848, 2558, 3314, 3086, 3029, 2956, 3517, 2651, 2914, 2680, 2632, 3121, 3100, 3528, 3526, 3084, 4220, 3304, 2846, 1186, 3235, 2903, 3559, 2687, 3409, 3237, 2900, 2999, 3349, 3171, 2752, 3262, 3504, 3047, 4376, 3193, 3430, 2525, 2670, 2911, 3508, 2776, 2697, 3200, 2790, 3323, 2543, 2874, 2614, 3904, 3373, 3054, 2617, 4242, 3621, 2708, 4179, 4398, 3959, 3095, 1286, 3624, 4481, 1432, 3511, 2735, 4381, 3295, 1585, 1114, 1766, 3221, 2643, 2739, 3920, 644, 1116, 645, 646, 647, 1801, 4279, 3762, 1637, 1509, 1119, 2965, 2369, 2695, 3293, 650, 651, 1120, 652, 1121, 3264, 655, 658, 659, 4035, 2910, 3391, 2808, 3099, 2913, 3676, 2852, 3284, 2731, 1609, 3994, 1319, 4467, 1802, 1227, 1623, 662, 663, 664, 1124, 1125, 1128, 1129, 668, 669, 1130, 670, 1131, 1527, 1132, 671, 1772, 1135, 672, 1933, 1731, 1793, 675, 676, 3342, 1138, 1139, 677, 679, 1142, 1143, 681, 1145, 682, 685, 3822, 689, 690, 691, 1147, 1601, 3905, 694, 695, 1414, 1150, 1795, 1372, 1695, 1866, 4115, 1719, 698, 1920, 699, 700, 1544, 4305, 1636, 1393, 2010, 3810, 4452, 3677, 4227, 1277, 1400, 4402, 4157, 4197, 1337, 1253, 1532, 4028, 3989, 1493, 1854, 1902, 1510, 4182, 706, 707, 708, 4476, 1245, 714, 1841, 4234, 1314, 4096, 717, 1155, 4217, 1156, 723, 1157, 1627, 725, 1159, 1953, 1160, 1201, 727, 3787, 3747, 730, 1846, 3815, 2005, 1964, 1822, 1262, 4480, 1537, 1291, 1318, 4294, 1582, 734, 3439, 2833, 4287, 4509, 4505, 4267, 3697, 3272, 4112, 2967, 3651, 1628, 3705, 1195, 3859, 1164, 1165, 1166, 1745, 1973, 1168, 3807, 4307, 1454, or 1781.

[0216] A VP capsid polypeptide may have a 581 to 589 region having a sequence of SEQ ID NO: 5014, wherein X⁶ of SEQ ID NO: 5014 is K or R. In some embodiments, the 581 to 589 region has a sequence of any one of SEQ ID NOs: 738, 4177, 1289, 740, 14, 743, 744, 17, 3477, 1548, 3051, 2982, 2877, 746, 19, 3036, 3426, 3073, 3169, 747, 3362, 2784, 21, 3192, 22, 1638, 748, 24, 749, 27, 1703, 1836, 28, 3660, 29, 750, 1640, 33, 35, 36, 1653, 1205, 3795, 753, 4288, 4219, 2770, 2962, 4241, 4107, 2718, 3317, 4391, 3263, 2553, 3947, 2710, 2608, 3467, 2796, 2961, 2529, 3320, 2674, 2635, 3446, 3053, 3250, 3688, 1998, 4320, 3351, 2655, 3514, 2779, 3194, 3319, 3224, 3281, 3708, 2807, 3562, 3274, 3374, 3013, 3416, 2981, 3065, 2777, 3469, 2977, 2638, 2972, 3059, 2574, 3380, 4262, 3167, 3368, 2781, 3547, 3386, 1225, 2960, 3485, 3370, 3443, 2824, 1467, 3327, 3178, 3006, 3252, 2991, 3470, 2888, 2572, 3418, 2642, 2519, 3363, 40, 2633, 44, 45, 756, 47, 48, 1952, 3122, 2551, 3718, 3484, 3577, 1308, 3960, 1378, 2994, 3080, 2589, 3681, 51, 760, 762, 3925, 3654, 763, 59, 60, 4086, 1740, 1660, 62, 1966, 63, 2438, 768, 66, 67, 68, 3816, 2599, 2706, 72, 73, 74, 3865, 1549, 1361, 3882, 773, 3713, 1942, 1312, 4501, 76, 1413, 775, 1560, 4289, 3757, 3593, 3908, 4397, 4415, 3723, 3754, 4360, 3945, 2854, 3523, 3669, 1356, 4065, 1294, 1484, 85, 86, 3891, 4456, 4040, 4496, 1982, 2001, 1478, 1189, 1490, 1885, 1926, 89, 780, 1180, 92, 781, 782, 783, 786, 94, 95, 788, 1831, 1867, 96, 4458, 97, 1970, 1936, 1590, 98, 99, 789, 790, 1298, 1688, 791, 792, 2007, 102, 103, 104, 105, 107, 108, 1579, 1906, 111, 798, 112, 799, 800, 1444, 801, 114, 115, 1344, 116, 802, 117, 118, 119, 121, 803, 1463, 1760, 806, 126, 128, 807, 129, 131, 808, 133, 1978, 811, 812, 135, 136, 137, 138, 814, 140, 1326, 141, 142, 143, 2344, 816, 1634, 1302, 817, 818, 147, 148, 149, 150, 151, 154, 155, 819, 820, 156, 157, 158, 161, 162, 165, 822, 168, 169, 170, 823, 172, 1651, 173, 1483, 174, 825, 176, 178, 180, 827, 181, 828, 4911, 184, 186, 188, 189, 830, 192, 193, 194, 196, 1391, 198, 199, 200, 201, 202, 203, 205, 832, 206, 834, 207, 208, 209, 210, 835, 836, 1334, 3901, 3312, 2649, 1450, 4386, 3028, 1446, 1522, 3490, 217, 219, 1612, 220, 221, 222, 839, 223, 840, 224, 225, 228, 229, 230, 231, 842, 232, 233, 234, 238, 847, 239, 850, 851, 853, 1536, 240, 241, 242, 243, 244, 245, 247, 250, 251, 254, 255, 857, 256, 258, 259, 859, 260, 861, 862, 864, 263, 2318, 865, 2326, 264, 1241, 266, 1477, 867, 268, 868, 269, 270, 869, 870, 271, 871, 872, 272, 873, 1252, 1591, 875, 274, 275, 276, 876, 877, 277, 278, 280, 1892, 1539, 881, 3601, 3877, 1460, 282, 1799, 284, 1626, 286, 1374, 1620, 1290, 1354, 887, 1956, 889, 292, 4324, 4138, 891, 296, 3903, 297, 3829, 3809, 4271, 3844, 1436, 300, 1617, 1961, 302, 304, 305, 2147, 1589, 4370, 307, 3646, 4059, 1431, 1331, 312, 1779, 313, 896, 1558, 1552, 318, 319, 322, 1958, 323, 324, 901, 1491, 328, 329, 4484, 907, 3536, 2701, 2799, 3332, 3294, 3159, 3069, 2637, 3025, 2782, 3247, 3350, 2692, 2586, 3004, 3049, 2694, 2650, 3554, 2983, 3403, 3214, 3163, 2541, 3090, 3097, 3462, 1430, 2941, 3486, 2842, 3558, 3104, 3037, 3419, 2780, 2931, 1276, 2928, 2609, 3068, 3128, 2548, 2538, 2618, 2789, 3228, 2657, 3189, 2863, 3307, 3300, 2546, 3048, 3543, 2946, 2975, 3346, 3067, 2728, 2955, 3408, 3027, 3094, 3203, 2988, 2751, 2953, 2566, 2578, 2823, 3063, 3335, 3000, 3181, 3011, 3138, 3389, 2805, 3074, 2894, 3149, 2560, 3417, 3265, 3378, 2901, 2837, 2822, 2745, 3473, 3530, 3040, 2597, 3509, 3522, 3161, 2926, 3209, 3105, 3400, 2630, 2905, 2671, 2818, 2806, 2702, 2709, 3549, 3538, 2534, 2773, 2623, 3491, 3243, 3136, 2693, 3164, 3343, 2918, 2555, 2794, 2679, 3510, 3110, 2672, 3442, 2929, 3184, 3488, 3414, 3093, 2996, 3141, 3544, 3102, 2856, 2957, 3466, 3461, 2788, 2660, 3344, 3204, 2720, 3379, 2826, 1789, 2785, 3249, 3527, 4460, 3352, 2569, 4457, 2011, 4319, 3906, 1533, 1755, 4248, 1557, 3804, 1602, 4188, 1330, 4349, 3337, 3533, 2629, 3038, 2539, 3567, 3291, 3348, 3115, 3359, 2993, 3079, 3506, 2527, 2963, 2938, 2516, 3113, 2639, 3143, 3044, 2747, 3154, 3280, 3039, 2743, 2902, 3056, 2554, 2522, 3103, 3210, 3434, 2656, 4251, 2588, 3553, 2714, 3078, 3222, 3137, 3357, 2717, 2944, 3012, 3220, 3202, 2811, 3083, 3269, 3566, 2699, 2515, 3023, 2533, 3288, 3075, 3005, 2685, 3058, 2976, 2622, 3333, 3463, 2939, 3521, 3268, 3117, 2626, 2616, 3240, 2570, 3565, 2919, 3157, 2849, 3444, 2631, 3420, 2659, 3325, 3186, 2920, 3258, 3440, 3457, 3310, 2761, 3134, 2621, 3531, 2711, 2774, 2867, 2585, 3155, 2620, 3156, 2844, 3126, 3160, 2909, 3542, 3225, 2887, 3474, 3218, 2744, 2896, 3135, 3424, 3498, 3529, 2661, 2667, 2549, 2819, 2768, 2935, 3182, 2772, 3230, 3043, 2922, 3581, 2869, 2610, 3298, 2775, 3108, 2603, 2612, 2860, 3187, 3238, 3786, 4385, 3016, 3436, 2876, 2987, 3532, 3438, 3561, 3259, 2663, 2890, 3433, 3071, 3018, 2580, 2755, 3015, 2540, 3398, 2664, 2583, 2830, 2644, 2641, 3513, 2725, 2723, 3338, 3556, 2866, 2514, 2932, 2753, 2862, 2899, 2605, 2989, 3096, 3124, 2985, 2716, 3145, 3017, 2591, 2640, 3033, 3316, 3412, 2971, 3256, 3153, 3575, 3339, 2915, 2531, 3552, 3475, 3060, 3375, 2756, 3382, 2847, 2859, 3251, 3702, 3423, 2537, 2801, 3076, 2696, 3459, 3144, 3441, 2802, 3479, 2907, 3512, 3518, 3021, 2871, 3032, 2647, 2945, 3045, 2763, 3313, 3034, 3315, 3541, 2746, 2669, 2524, 3003, 2732, 3166, 3046, 3306, 2873, 3364, 3253, 3215, 3061, 2804, 2722, 2964, 2990, 2836, 3173, 2762, 3737, 2628, 3507, 2564, 3031, 2872, 3360, 2658, 2930, 2904, 3244, 3217, 3311, 3445, 2840, 3372, 2958, 3098, 3356, 3456, 3388, 2624, 3207, 2576, 2742, 2665, 2815, 3052, 3421, 2593, 3242, 2535, 2966, 2898, 2858, 2943, 2668, 2798, 3196, 2528, 2713, 3001, 2691, 2948, 2767, 2544, 3302, 2734, 2893, 2592, 2861, 3502, 2969, 2582, 3229, 2676, 2545, 3255, 3330, 2547, 3257, 2882, 3151, 3088, 2883, 3318, 2645, 2733, 2587, 3500, 3008, 2715, 2845, 3183, 2654, 3233, 3267, 2741, 2827, 2704, 3091, 2832, 2736, 3177, 3271, 2835, 2908, 3176, 2947, 3292, 3191, 2517, 3026, 3082, 3392, 2584, 2712, 3213, 3451, 2634, 3150, 2810, 3303, 2573, 3460, 2615, 3394, 2828, 3329, 4377, 4499, 3555, 2974, 3629, 3578, 3885, 2817, 3248, 2954, 3334, 3571, 3345, 3551, 3384, 3422, 2530, 2973, 4418, 4081, 3951, 1764, 1671, 1843, 3449, 3185, 3399, 2786, 3055, 3472, 3397, 2601, 3564, 3277, 3548, 3179, 3407, 3841, 3347, 3142, 3241, 3077, 2700, 3147, 2648, 3283, 2829, 3278, 2581, 2536, 4363, 2848, 3410, 2797, 2523, 2520, 2721, 3496, 2571, 3198, 3219, 3030, 2673, 2921, 3301, 3322, 2705, 3239, 2949, 3369, 3396, 2892, 2897, 2766, 3174, 3297, 2550, 2889, 2933, 2793, 2627, 2677, 3119, 2596, 3226, 3172, 3089, 2868, 2839, 3120, 3286, 2843, 3465, 3946, 2682, 2865, 3539, 3168, 2864, 3308, 3557, 2940, 3109, 3503, 2625, 3455, 3114, 2595, 3331, 2978, 2518, 2521, 4079, 3024, 3573, 2952, 2653, 3180, 2813, 2652, 2600, 2816, 3201, 3188, 3270, 2997, 2992, 3009, 3520, 2936, 3275, 3165, 3447, 3131, 3305, 2809, 2792, 2729, 2814, 2619, 3266, 2825, 3066, 2857, 2998, 3064, 2681, 3035, 3279, 2764, 3480, 3127, 2912, 3010, 2607, 3211, 3111, 3041, 4269, 3487, 3489, 3019, 1266, 1415, 2980, 3428, 3435, 3482, 3020, 2748, 2646, 2787, 2760, 2563, 3085, 3133, 3158, 3170, 2703, 3494, 2556, 2552, 3395, 3245, 3404, 2675, 2791, 1911, 908, 1935, 2749, 3341, 3355, 2575, 2942, 2886, 2758, 2594, 3495, 2884, 3516, 3042, 2737, 2923, 3563, 2855, 3476, 2611, 2937, 3383, 3497, 3402, 3162, 2662, 2875, 3223, 2878, 1808, 3285, 2757, 3057, 2951, 3519, 2579, 2853, 3387, 3401, 3493, 3393, 1608, 3365, 2885, 3574, 3081, 3007, 3568, 3152, 3367, 3358, 336, 3468, 3290, 3550, 3132, 2726, 2879, 3190, 3309, 2613, 2765, 3106, 1355, 3454, 2851, 2881, 3232, 3458, 3326, 3353, 2927, 3212, 2950, 3376, 3208, 3062, 3612, 3195, 3385, 2686, 2602, 3569, 3123, 2727, 1622, 2821, 2636, 2750, 2850, 3050, 2925, 3336, 3540, 2689, 3139, 2526, 3361, 3022, 3427, 3107, 3140, 3371, 3276, 2831, 3501, 2924, 3366, 3199, 3101, 3321, 3499, 2917, 2683, 2800, 2812, 3340, 3227, 3148, 3657, 4446, 1464, 1886, 2666, 3246, 3130, 3560, 3236, 2730, 3572, 3689, 2968, 1457, 3450, 2577, 2567, 2532, 3415, 2934, 2984, 2568, 4147, 3002, 2986, 910, 2979, 2542, 1762, 4472, 1529, 4057, 1976, 4507, 1583, 1711, 2013, 1594, 4440, 344, 920, 921, 4498, 3728, 3637, 3570, 3429, 4091, 2870, 2995, 4338, 3205, 2880, 3261, 3968, 4291, 4204, 4071, 4034, 1742, 2820, 3912, 3287, 1218, 1190, 4145, 354, 1782, 927, 3610, 356, 4224, 1918, 1959, 1840, 3736, 1770, 929, 930, 931, 4155, 360, 361, 362, 364, 1279, 365, 1543, 366, 367, 4049, 1633, 1722, 369, 1495, 1566, 373, 1211, 1726, 1442, 1748, 4142, 1434, 1358, 1191, 3732, 4110, 4039, 4506, 4156, 4036, 4030, 4016, 3899, 1247, 1855, 3919, 1244, 4140, 3930, 4117, 4189, 4001, 3643, 3619, 1240, 1575, 3871, 4135, 4408, 3604, 1274, 4149, 3741, 1938, 3709, 3622, 3834, 1983, 1743, 3979, 4461, 4113, 3817, 4232, 4214, 3902, 1219, 1486, 1512, 1516, 4047, 4082, 4094, 1574, 1248, 4078, 1872, 1426, 3687, 4318, 4243, 3866, 3704, 4172, 1856, 3324, 2769, 2678, 1561, 3296, 377, 1395, 1584, 4093, 4453, 4210, 4009, 4264, 4339, 1738, 4474, 4013, 4266, 1771, 1759, 1922, 3860, 3832, 1349, 1381, 3663, 1185, 3932, 3858, 1198, 4192, 3611, 1919, 3790, 3712, 4095, 1887, 4468, 1720, 4247, 934, 1790, 2002, 1657, 1336, 3894, 3576, 4314, 3695, 1850, 4362, 1815, 3638, 4454, 1661, 4504, 1359, 3650, 1305, 1648, 3831, 4435, 4451, 1993, 3849, 1718, 4068, 1835, 1425, 1428, 4380, 1658, 1452, 4024, 4072, 3791, 4491, 4323, 4014, 1304, 1511, 1981, 1676, 4422, 1283, 3861, 3644, 4259, 1418, 1176, 4216, 1421, 3992, 4423, 4253, 3748, 4119, 1297, 1954, 4450, 3711, 4344, 1578, 4384, 3892, 3674, 3595, 4405, 3973, 4109, 4159, 3744, 4387, 4275, 4492, 4365, 4118, 4278, 3751, 3678, 4353, 3175, 2970, 1228, 3534, 3437, 3406, 3641, 4470, 3941, 4348, 3587, 3818, 4350, 3821, 3929, 3824, 4465, 1398, 3828, 1284, 3773, 4209, 3014, 3884, 2783, 4038, 3545, 2916, 3112, 2834, 3880, 4399, 4048, 3752, 4207, 1235, 3943, 4355, 4087, 4100, 4163, 4486, 4178, 1643, 4152, 4445, 4303, 4284, 1213, 4382, 1399, 3714, 4487, 3615, 4018, 4420, 4121, 3724, 4282, 4310, 4488, 4127, 3670, 4052, 3627, 3777, 1371, 3685, 4258, 3812, 1581, 4124, 4508, 4500, 3652, 3972, 1528, 3717, 2740, 3125, 3546, 3842, 4404, 3690, 3962, 4136, 3589, 3907, 4153, 2707, 4180, 3923, 4444, 4361, 4394, 3758, 4510, 3742, 1710, 1407, 4187, 1193, 1188, 1196, 1724, 1717, 1200, 1997, 1701, 4280, 4006, 1984, 3833, 2561, 4442, 3900, 4298, 1761, 4388, 1597, 4317, 4249, 1341, 1203, 1680, 4441, 3628, 3725, 1945, 937, 4206, 1588, 1439, 3794, 4447, 3776, 3658, 4064, 4011, 4272, 4503, 1324, 3594, 3680, 1300, 1750, 3913, 3774, 1877, 1987, 3998, 3686, 3696, 4463, 3853, 4244, 4083, 1909, 3897, 1546, 3613, 3273, 3452, 3525, 1229, 3835, 1234, 3970, 3856, 3586, 1175, 4321, 2778, 4412, 4407, 3823, 1427, 1507, 1878, 4333, 3146, 4281, 4211, 3843, 1677, 1524, 1525, 1974, 1239, 4167, 3740, 1342, 1471, 4176, 1232, 1989, 4125, 1741, 1580, 4060, 1576, 1212, 3921, 1174, 4061, 4021, 3693, 3734, 1382, 3684, 3806, 3635, 3976, 3840, 4286, 3836, 4161, 3659, 3605, 4392, 4328, 1316, 4173, 4265, 1246, 1629, 1829, 3826, 1992, 1656, 1914, 1839, 3984, 3910, 4160, 4184, 4132, 4250, 1792, 3769, 1534, 4003, 1689, 1599, 1265, 1410, 1823, 1498, 1329, 386, 940, 1655, 3874, 4261, 3626, 3579, 1644, 3936, 4054, 4260, 4297, 4357, 4022, 4046, 1222, 1996, 3788, 3953, 4226, 4277, 4101, 3797, 4019, 3771, 3632, 1402, 4137, 3772, 3661, 4186, 4174, 1170, 3850, 1315, 1611, 1859, 4183, 1403, 4033, 3623, 3596, 1461, 1848, 1173, 1928, 1765, 3719, 3584, 4165, 4191, 3980, 4058, 4200, 4336, 3958, 1260, 4051, 3798, 4032, 1774, 4322, 3991, 4106, 3978, 3965, 4464, 3813, 4154, 1365, 3846, 4345, 4379, 3603, 3937, 3801, 1787, 1214, 4483, 4201, 1845, 1220, 4245, 1347, 3867, 1900, 3640, 3916, 4089, 3745, 3975, 4256, 4308, 4000, 3868, 4403, 3883, 4326, 4393, 3895, 4237, 3955, 4005, 4092, 4372, 4283, 3805, 4151, 3982, 3597, 3872, 3987, 4490, 3876, 3668, 4300, 1679, 1242, 3598, 3583, 3647, 4304, 3779, 1907, 4042, 3648, 3996, 3800, 4367, 4099, 1807, 3887, 4428, 1625, 1390, 1884, 1682, 4364, 4306, 3869, 1278, 942, 1505, 1709, 3600, 3914, 3948, 1865, 1716, 3961, 1506, 4221, 1376, 1683, 4276, 1721, 1632, 3607, 1455, 1913, 1497, 1317, 1951, 1778, 3768, 4225, 1668, 390, 4406, 4341, 1480, 1714, 1422, 397, 3618, 4433, 1177, 3898, 398, 950, 400, 1965, 4471, 953, 401, 403, 955, 1482, 3602, 4434, 3721, 1592, 1825, 1698, 1519, 1352, 4409, 1977, 405, 1631, 1684, 409, 3889, 2117, 411, 413, 414, 415, 961, 1905, 416, 963, 3675, 1833, 3974, 965, 970, 1897, 1272, 4133, 3830, 972, 424, 427, 1708, 4141, 3749, 1619, 975, 4044, 3590, 1944, 4126, 1923, 1706, 432, 976, 978, 4400, 1606, 980, 2604, 2895, 436, 3448, 2188, 438, 1692, 442, 3862, 4055, 4358, 2276, 985, 1664, 443, 4309, 4045, 3854, 3682, 1972, 2688, 4366, 3425, 3231, 3649, 2759, 2724, 3755, 1216, 3599, 3775, 2754, 2606, 3471, 3234, 2565, 2803, 2562, 2684, 3411, 3405, 2690, 1255, 3694, 3985, 3535, 1306, 4084, 3282, 1780, 448, 990, 991, 1485, 992, 1728, 993, 994, 1696, 997, 3116, 1869, 456, 1386, 1000, 3879, 2698, 460, 1001, 461, 1447, 1002, 1003, 463, 464, 4425, 465, 1004, 466, 469, 1231, 1468, 470, 1005, 476, 1273, 1744, 1488, 1659, 1604, 479, 1013, 1014, 481, 4313, 1499, 1016, 4073, 1777, 485, 4274, 487, 1775, 4205, 1526, 1697, 2000, 488, 1894, 1882, 1817, 1880, 490, 1018, 3917, 3616, 4311, 4473, 4085, 4401, 3783, 3765, 1538, 3870, 491, 3699, 3792, 4290, 494, 2421, 4090, 2012, 1803, 3642, 1322, 1020, 502, 1333, 504, 1890, 507, 3608, 1732, 1864, 1816, 1531, 513, 3636, 514, 1699, 1027, 1366, 4950, 4027, 3478, 2959, 1293, 3197, 1595, 3413, 518, 1032, 1033, 1675, 1797, 2315, 521, 1999, 3759, 1215, 4122, 1730, 3966, 1035, 4973, 528, 3911, 3289, 1821, 530, 532, 1874, 533, 1038, 538, 539, 3767, 1929, 3683, 1338, 1616, 1901, 1796, 1517, 4331, 4332, 4466, 2719, 4123, 4233, 1824, 3129, 3087, 3505, 4158, 4254, 3720, 4351, 4414, 3453, 3254, 1649, 544, 4240, 3580, 1046, 548, 549, 2598, 552, 553, 3819, 1259, 4062, 554, 2841, 3515, 1433, 1323, 4301, 555, 558, 3738, 1567, 559, 1054, 1270, 3857, 2175, 1257, 1238, 3662, 561, 1058, 563, 1061, 4203, 1899, 3981, 1062, 1303, 4116, 1946, 3620, 1514, 4002, 3679, 3964, 3707, 3666, 1348, 4273, 1804, 4497, 1401, 4438, 1895, 1264, 1912, 573, 3939, 4170, 4056, 1271, 1521, 1221, 1451, 3934, 4080, 4352, 1700, 3739, 1419, 1811, 3950, 1690, 3716, 1569, 1437, 1674, 4337, 1285, 4268, 1183, 3881, 3938, 4198, 4416, 4229, 4292, 4193, 4325, 4375, 4432, 4215, 3944, 4195, 4223, 1540, 4455, 4512, 1723, 3750, 4070, 4104, 4235, 1863, 4346, 1881, 1814, 4443, 3761, 1587, 3592, 576, 4469, 1275, 1950, 4129, 1296, 1551, 3733, 4111, 3993, 4108, 1287, 1713, 1556, 1736, 1995, 1705, 1861, 4120, 4417, 1785, 1236, 4293, 1827, 3839, 3983, 4395, 1957, 3928, 4295, 3715, 3855, 3609, 4076, 4175, 3927, 1757, 4299, 1773, 1364, 1462, 4007, 3729, 3665, 3722, 1691, 1712, 1624, 1751, 1394, 3924, 3952, 581, 2003, 1559, 1250, 1555, 4114, 1818, 1076, 4448, 1078, 1786, 3354, 1832, 3432, 2891, 1903, 4459, 589, 1563, 1084, 591, 592, 594, 595, 1858, 596, 1453, 2559, 2590, 2738, 4478, 4069, 1809, 1327, 4150, 3260, 3481, 3672, 3625, 4439, 3852, 3997, 3847, 4050, 3377, 4424, 4143, 4493, 3492, 1412, 4017, 4477, 1794, 602, 4263, 3072, 2009, 1754, 3888, 603, 604, 1368, 3827, 4103, 1571, 1438, 611, 1093, 612, 1094, 3701, 4389, 614, 615, 1332, 1715, 4369, 1652, 1541, 1921, 1733, 1373, 1870, 619, 4218, 1798, 1702, 1384, 3700, 1788, 1600, 624, 2473, 1423, 2771, 1339, 3875, 3070, 2015, 2557, 2795, 2906, 2103, 3299, 3118, 4576, 1103, 1614, 1947, 631, 4479, 3766, 1107, 635, 1813, 636, 2431, 637, 1109, 639, 3706, 1110, 640, 642, 3735, 3390, 1694, 3431, 2838, 3483, 3464, 3848, 2558, 3314, 3086, 3029, 2956, 3517, 2651, 2914, 2680, 2632, 3121, 3100, 3528, 3526, 3084, 4220, 3304, 2846, 1186, 3235, 2903, 3559, 2687, 3409, 3237, 2900, 2999, 3349, 3171, 2752, 3262, 3504, 3047, 3193, 3430, 2525, 2670, 2911, 3508, 2776, 2697, 3200, 2790, 3323, 2543, 2874, 2614, 3904, 3373, 3054, 2617, 4242, 3621, 2708, 4179, 4398, 3959, 1269, 3095, 1286, 3624, 4481, 3511, 2735, 4381, 3295, 1568, 1766, 3221, 2643, 2739, 3920, 647, 1801, 4279, 3762, 1637, 1509, 648, 1117, 1119, 2965, 2695, 3293, 4722, 1121, 653, 1122, 3264, 655, 656, 657, 4035, 2910, 3391, 2808, 3099, 2913, 3676, 2852, 3284, 2731, 3537, 3994, 1319, 4467, 1623, 660, 1123, 664, 1126, 1128, 1129, 1130, 670, 1527, 671, 1772, 1137, 5005, 1933, 1731, 1793, 3342, 1140, 1141, 687, 3822, 1601, 1148, 693, 3905, 694, 1414, 1149, 697, 1795, 1372, 1695, 1866, 1151, 4115, 1719, 1920, 4999, 1544, 703, 4031, 4305, 1636, 3810, 4452, 3677, 4227, 4402, 4157, 4197, 1337, 1253, 4028, 3989, 704, 1493, 1902, 1152, 4182, 707, 708, 709, 4476, 1375, 713, 714, 1841, 4234, 1154, 1314, 4096, 718, 719, 720, 2063, 1311, 721, 4217, 1627, 1158, 1953, 1201, 3787, 729, 3747, 730, 1846, 3815, 1964, 1822, 1262, 4480, 1537, 1291, 1318, 4294, 1582, 3439, 2833, 4287, 4509, 4505, 4267, 3697, 3272, 4112, 2967, 3651, 1805, 3705, 1195, 3859, 1164, 1165, 2351, 2423, 1745, 1973, 3807, 4307, 1169, 1454, or 1781.

[0217] A VP capsid polypeptide may have a 581 to 589 region having a sequence of SEQ ID NO: 5014, wherein X³ of SEQ ID NO: 5014 is not D. In some embodiments, the 581 to 589 region has a sequence of any one of SEQ ID NOs: 738, 739, 4177, 1289, 740, 14, 15, 741, 742, 743, 16, 744, 17, 18, 745, 3477, 1548, 3051, 2982, 2171, 2877, 746, 19, 20, 3036, 3426, 3073, 3169, 747, 2406, 3362, 2784, 2469, 4889, 21, 3192, 4942, 22, 23, 1638, 748, 24, 25, 749, 26, 27, 1703, 1836, 28, 2038, 2301, 3660, 29, 750, 30, 31, 32, 2095, 1640, 33, 34, 35, 36, 37, 4742, 2450, 38, 4925, 39, 751, 752, 2144, 1653, 1205, 3795, 753, 4288, 4219, 2770, 2962, 4241, 4107, 2718, 3317, 4391, 4053, 3263, 2553, 3947, 2710, 2608, 3467, 2796, 2961, 2529, 3320, 2674, 2635, 3446, 3053, 3250, 3688, 1182, 1998, 4320, 3351, 2655, 3514, 2779, 3194, 3319, 3224, 3281, 3708, 2807, 3562, 3274, 3374, 3013, 3416, 2981, 3065, 2777, 3469, 2977, 2638, 2972, 3059, 2574, 3380, 4262, 3167, 3368, 2781, 3547, 3386, 1225, 2960, 3485, 3370, 3443, 2824, 754, 1467, 3327, 3178, 3006, 3252, 2991, 3470, 2888, 2572, 3418, 2642, 2519, 3363, 40, 2633, 41, 42, 43, 755, 2511, 44, 45, 756, 46, 757, 47, 48, 1952, 758, 2341, 2410, 49, 3122, 2551, 3718, 4806, 2216, 3484, 3577, 759, 2080, 2072, 2034, 50, 1308, 1230, 3960, 1378, 2994, 3080, 2589, 3681, 51, 2167, 52, 760, 53, 2389, 4755, 761, 4591, 762, 4659, 54, 2146, 3925, 55, 3654, 2087, 2346, 4766, 4682, 4984, 4744, 56, 763, 764, 4626, 4702, 57, 58, 59, 60, 61, 4086, 1740, 1660, 765, 766, 62, 1966, 2032, 2499, 2332, 767, 63, 2096, 2181, 4913, 2438, 2041, 64, 768, 769, 770, 2384, 2402, 771, 65, 66, 2111, 67, 772, 2458, 2197, 68, 3816, 69, 2599, 2706, 2497, 70, 2399, 71, 4769, 2366, 72, 73, 74, 3865, 1549, 1361, 2453, 3882, 773, 3713, 1942, 2140, 75, 1312, 4501, 76, 77, 774, 1413, 775, 776, 78, 1560, 4289, 3757, 79, 3593, 4043, 1806, 3908, 4397, 1615, 4415, 3723, 2006, 3754, 1470, 4360, 80, 3945, 2854, 3523, 3669, 1356, 777, 2379, 81, 82, 4065, 83, 84, 2030, 1294, 2413, 2064, 1484, 2299, 85, 4594, 86, 778, 87, 3891, 4456, 4040, 4496, 1982, 2001, 1478, 1189, 88, 1490, 1885, 1926, 89, 90, 91, 779, 2270, 780, 2161, 1180, 92, 781, 782, 783, 93, 2356, 784, 785, 786, 94, 95, 788, 1831, 1867, 96, 4458, 97, 1970, 4656, 2173, 1936, 2349, 1590, 98, 99, 100, 789, 790, 1298, 101, 1688, 791, 792, 2007, 4556, 2070, 102, 793, 4632, 103, 794, 795, 104, 105, 106, 2229, 796, 4980, 4691, 107, 2440, 1849, 108, 2014, 797, 4736, 2509, 2018, 2227, 4787, 1579, 110, 1906, 111, 2428, 798, 2075, 112, 2411, 113, 2359, 799, 4848, 800, 2461, 1444, 2313, 2350, 4579, 4821, 801, 114, 2329, 4864, 4834, 115, 1344, 116, 802, 117, 118, 119, 4929, 4677, 120, 4791, 2158, 121, 803, 804, 1463, 805, 122, 2139, 2290, 1760, 2465, 123, 2424, 2058, 2230, 124, 4717, 806, 125, 126, 2370, 127, 4521, 128, 4971, 4994, 807, 2085, 4533, 129, 130, 131, 132, 4933, 808, 2336, 2026, 2204, 809, 810, 2281, 133, 1978, 134, 811, 812, 135, 136, 137, 138, 813, 814, 139, 4673, 140, 815, 1326, 141, 142, 143, 2344, 4544, 5009, 144, 145, 816, 4654, 2125, 4663, 4810, 4816, 1634, 1302, 817, 146, 818, 147, 148, 149, 4546, 150, 151, 152, 153, 154, 155, 819, 820, 156, 2149, 157, 2295, 821, 158, 159, 160, 161, 4631, 2441, 162, 163, 164, 165, 166, 822, 167, 168, 169, 170, 171, 823, 172, 4613, 824, 1651, 173, 1483, 174, 175, 825, 176, 177, 178, 179, 4624, 2170, 4809, 4520, 180, 826, 827, 181, 828, 4695, 2130, 4911, 182, 4582, 4873, 2189, 183, 4641, 829, 184, 185, 2244, 4647, 186, 187, 188, 189, 190, 2114, 830, 191, 192, 193, 194, 2071, 4615, 2361, 195, 4852, 2187, 4914, 4947, 196, 1391, 197, 4534, 4726, 4788, 198, 199, 831, 2240, 2223, 200, 201, 202, 203, 2106, 2503, 4775, 204, 205, 832, 833, 206, 834, 2232, 2294, 207, 2166, 208, 209, 210, 835, 836, 1334, 837, 3901, 3312, 2649, 1301, 211, 212, 1450, 4386, 3028, 213, 1446, 214, 2206, 215, 1896, 1522, 3490, 838, 216, 2090, 2241, 217, 218, 4653, 219, 1612, 220, 221, 222, 839, 223, 4974, 4790, 4915, 2464, 4567, 4774, 4964, 2360, 840, 224, 4928, 4741, 225, 2088, 4751, 226, 227, 4890, 4519, 4883, 228, 4786, 229, 230, 231, 2393, 2448, 841, 842, 232, 233, 4782, 234, 2269, 843, 235, 844, 236, 237, 4930, 845, 846, 238, 847, 239, 848, 849, 2150, 850, 851, 852, 853, 1536, 240, 854, 241, 242, 243, 244, 245, 246, 247, 248, 4696, 855, 4634, 856, 249, 250, 251, 252, 253, 254, 255, 857, 2115, 4880, 2218, 256, 257, 258, 259, 858, 859, 260, 261, 860, 861, 862, 262, 4966, 863, 864, 263, 4749, 4970, 2296, 2318, 4535, 865, 2326, 264, 1241, 265, 266, 866, 1477, 267, 867, 4977, 268, 868, 269, 4668, 5002, 270, 869, 870, 271, 871, 872, 272, 4822, 4709, 873, 4655, 4972, 2392, 2317, 874, 1252, 273, 1591, 4975, 875, 274, 2025, 275, 1980, 276, 876, 877, 2066, 277, 278, 279, 4670, 280, 2323, 2288, 2334, 4939, 4689, 281, 878, 2416, 1892, 879, 1539, 2214, 2215, 880, 2327, 881, 882, 4601, 883, 1295, 3601, 3877, 1930, 1420, 1678, 1460, 2306, 884, 282, 1799, 283, 284, 4988, 4871, 4553, 4772, 4817, 2260, 1626, 2082, 885, 286, 1374, 886, 2119, 2504, 2468, 287, 1620, 1290, 2425, 2482, 4564, 4671, 2282, 288, 2354, 1354, 2033, 289, 887, 290, 888, 291, 1956, 2362, 2467, 889, 2357, 4547, 4765, 292, 4794, 2391, 4324, 293, 890, 294, 295, 4138, 891, 2297, 2254, 296, 2224, 3903, 297, 892, 3829, 298, 299, 3809, 4271, 3844, 1436, 300, 1515, 1617, 301, 1961, 4649, 5010, 302, 2060, 303, 304, 305, 2452, 2147, 4574, 4538, 306, 2293, 1589, 893, 4946, 4370, 4841, 2342, 307, 308, 309, 894, 2246, 2155, 3646, 4059, 1431, 1331, 310, 311, 4948, 312, 895, 1779, 313, 314, 315, 316, 896, 1558, 1552, 317, 2312, 318, 319, 897, 320, 898, 321, 322, 899, 1958, 2022, 2016, 900, 2454, 323, 2427, 2134, 324, 901, 325, 902, 326, 2373, 4803, 2459, 1491, 327, 328, 903, 2463, 2264, 329, 330, 904, 1635, 4820, 905, 2506, 331, 4706, 4484, 1756, 906, 907, 4661, 2179, 4584, 4609, 332, 4907, 4635, 4529, 4683, 4523, 4561, 333, 3536, 2701, 2799, 3332, 3294, 3159, 3069, 2637, 3025, 2782, 3247, 3350, 2692, 2586, 3004, 3049, 2694, 2650, 3554, 2983, 3403, 3214, 3163, 2541, 3090, 3097, 3462, 1430, 2941, 3486, 2842, 3558, 3104, 3037, 3419, 2780, 2931, 1276, 2928, 2609, 3068, 3128, 2548, 2538, 2618, 2789, 3228, 2657, 3189, 2128, 2863, 3307, 3300, 2546, 3048, 3543, 2946, 2975, 3346, 3067, 2728, 2955, 3408, 3027, 3094, 3203, 2988, 2751, 2953, 2566, 2578, 2823, 3063, 3335, 3000, 3181, 3011, 3138, 3389, 2805, 3074, 2894, 3149, 2560, 3417, 3265, 3378, 2901, 2837, 2822, 2745, 3473, 3530, 3040, 2597, 3509, 3522, 3161, 2926, 3209, 3105, 3400, 2630, 2905, 2671, 2818, 2806, 2702, 2709, 2400, 3549, 3538, 2534, 2773, 2623, 3491, 3243, 3136, 2693, 3164, 3343, 2918, 2555, 2794, 2679, 3510, 3110, 2672, 3442, 2929, 3184, 3488, 2135, 4763, 3414, 3093, 2996, 3141, 3544, 3102, 2856, 2957, 3466, 3461, 2788, 2660, 3344, 3204, 2720, 3379, 2826, 1789, 2396, 2785, 3249, 3527, 4460, 3352, 2051, 2569, 4457, 2011, 4857, 2163, 4319, 3906, 1533, 1755, 1888, 4248, 1557, 2153, 3804, 1363, 1934, 1602, 1404, 4188, 1330, 4349, 3337, 3533, 2629, 3038, 2539, 3567, 3291, 3348, 3115, 3359, 2993, 3079, 3506, 2527, 2963, 2938, 2516, 3113, 1345, 2639, 3143, 3044, 2747, 3154, 3280, 3039, 2743, 2902, 3056, 2554, 2522, 3103, 3210, 3434, 2656, 4251, 4166, 4196, 3206, 3328, 2588, 3553, 2714, 3078, 3222, 3137, 3357, 2717, 2944, 3012, 3220, 3202, 2811, 3083, 3269, 3566, 2699, 2515, 3023, 2533, 3288, 3075, 3005, 2685, 3058, 2976, 2622, 3333, 3463, 2939, 3521, 3268, 3117, 2626, 2616, 3240, 2570, 3565, 2919, 3157, 2849, 3444, 2631, 3420, 2659, 3325, 3186, 2920, 3258, 3440, 3457, 3310, 2761, 3134, 2621, 3531, 2711, 2774, 2867, 2585, 3155, 2620, 3156, 2844, 3126, 3160, 2909, 3542, 3225, 2887, 3474, 3218, 2744, 2896, 3135, 3424, 3498, 3529, 2661, 2667, 2549, 2819, 2768, 2935, 3182, 2772, 3230, 3043, 2922, 3581, 3524, 2869, 2610, 3298, 2775, 3108, 2603, 3614, 2612, 2860, 3187, 3238, 3786, 4385, 3016, 3436, 2876, 2987, 3532, 3438, 3561, 3259, 2663, 2890, 3433, 3071, 3018, 2580, 2755, 3015, 2540, 3398, 2664, 2583, 2830, 2644, 2641, 3513, 2725, 2723, 3338, 3556, 2866, 2514, 2932, 2753, 2862, 2899, 2605, 2989, 3096, 3124, 2985, 2716, 3145, 3017, 2591, 2640, 3033, 1853, 3216, 3316, 3412, 2971, 3256, 3153, 3575, 3339, 2915, 2531, 3552, 3475, 3060, 3375, 2756, 3382, 2847, 2859, 3251, 3702, 3423, 2537, 2801, 3076, 2696, 3092, 3459, 3144, 3441, 2802, 3479, 2907, 3512, 3518, 3021, 2871, 3032, 2647, 2945, 3045, 2763, 3313, 3034, 3315, 3541, 2746, 2669, 2524, 3003, 2732, 3166, 3046, 3306, 2873, 3364, 3253, 3215, 3061, 2804, 2722, 2964, 2990, 2836, 4098, 4449, 3173, 2762, 3737, 2628, 3507, 2564, 3031, 2872, 3360, 2658, 2930, 2904, 3244, 3217, 3311, 3445, 2840, 3372, 2958, 3098, 3356, 3456, 3388, 2624, 3207, 2576, 2742, 2665, 2815, 3052, 3421, 2593, 3242, 2535, 2966, 2898, 2858, 2943, 2668, 2798, 3196, 2528, 2713, 3001, 2691, 2948, 2767, 2544, 3302, 2734, 2893, 2592, 2861, 3502, 2969, 2582, 3229, 2676, 2545, 3255, 3330, 2547, 3257, 2882, 3151, 3088, 2883, 3318, 2645, 2733, 2587, 3500, 3008, 2715, 2845, 3183, 2654, 3233, 3267, 2741, 2827, 2704, 3091, 2832, 2736, 3177, 3271, 2835, 2908, 3176, 2947, 3292, 3191, 2517, 3026, 3082, 3392, 3381, 2584, 2712, 3213, 3451, 2634, 3150, 2810, 3303, 2573, 3460, 2615, 3394, 2828, 3329, 4377, 4499, 3555, 2974, 3782, 3629, 3578, 3885, 2817, 3248, 2954, 3334, 3571, 3345, 3551, 3384, 3422, 1357, 1844, 2530, 2973, 4418, 4081, 3951, 1764, 1671, 1852, 334, 1843, 3449, 3185, 3399, 2786, 3055, 3472, 3397, 2601, 3564, 3277, 4373, 3548, 3179, 3407, 3841, 3347, 3142, 4255, 4431, 3241, 3077, 2700, 3147, 2648, 3283, 2829, 3278, 2581, 2536, 4363, 2848, 3410, 2797, 2523, 2520, 2721, 3496, 2571, 3198, 3219, 3030, 2673, 2921, 3837, 3301, 3322, 2705, 3239, 2949, 3369, 3396, 2892, 2897, 2766, 3174, 3297, 2550, 2889, 2933, 2793, 2627, 2677, 3119, 2596, 3226, 3172, 3089, 2868, 2839, 3942, 3120, 3286, 2843, 3465, 1564, 3946, 4222, 1504, 3999, 2682, 1875, 2865, 3539, 3168, 2864, 3308, 3557, 2940, 3109, 3503, 2625, 3455, 3114, 2595, 3331, 2978, 2518, 2521, 4079, 3024, 3573, 2952, 2653, 1769, 3180, 2813, 2652, 2600, 2816, 3201, 3188, 3270, 2997, 2992, 3009, 3520, 2936, 3275, 3165, 3447, 3131, 3305, 2809, 2792, 2729, 2814, 2619, 3266, 2825, 3066, 2857, 2998, 3064, 2681, 3035, 3279, 2764, 3480, 3127, 2912, 3010, 2607, 3211, 3111, 3041, 1573, 3909, 4269, 3487, 3489, 3019, 335, 1266, 1415, 2980, 3428, 3435, 3482, 3020, 2748, 2646, 2787, 2760, 2563, 3085, 3133, 3158, 3170, 2703, 3494, 2556, 2552, 3395, 3245, 3404, 2675, 2791, 2252, 4845, 1911, 4856, 2363, 908, 1935, 4711, 4728, 2460, 2749, 3341, 3355, 2575, 2942, 2886, 2758, 2594, 3495, 2884, 3516, 3042, 2737, 2923, 3563, 2855, 3476, 2611, 2937, 3383, 3497, 3402, 3162, 2662, 2875, 3223, 2878, 2079, 1808, 3285, 2757, 3057, 2951, 3519, 2579, 2853, 3387, 3401, 3493, 3393, 1608, 3365, 2885, 3574, 3081, 3007, 3568, 3152, 3367, 3358, 336, 2268, 3468, 3290, 3550, 3132, 2726, 2879, 3190, 3309, 2613, 2765, 3106, 1355, 3454, 2851, 2881, 3232, 3458, 3326, 3353, 2927, 3212, 2950, 3376, 3208, 3062, 3612, 3195, 3385, 2686, 2602, 3569, 3123, 2727, 1622, 2821, 2636, 2750, 2850, 3050, 2925, 3336, 3540, 2689, 3139, 2526, 3361, 3022, 3427, 3107, 3140, 3371, 3276, 2831, 3501, 2924, 3366, 3199, 3101, 3321, 3499, 2917, 2683, 2800, 2812, 3340, 3227, 3148, 3657, 4446, 1746, 1464, 1886, 2666, 3246, 3130, 3560, 3236, 2730, 3572, 1607, 3689, 2968, 1457, 1500, 909, 337, 1184, 3450, 2577, 2567, 2532, 3415, 2934, 2984, 2568, 4147, 4943, 3002, 2986, 910, 2979, 2542, 2338, 2331, 2492, 1762, 4472, 1472, 1529, 2319, 2131, 4057, 4937, 2048, 4887, 1976, 4507, 1583, 338, 2078, 2372, 2102, 339, 911, 1711, 340, 912, 2013, 913, 2277, 914, 2403, 341, 915, 4672, 4902, 916, 342, 1594, 4440, 917, 343, 344, 4559, 918, 2439, 919, 345, 920, 346, 921, 922, 347, 2226, 348, 2180, 2298, 349, 350, 2099, 2036, 351, 4808, 923, 924, 4498, 1518, 3728, 3637, 3570, 3429, 4091, 2870, 2995, 4338, 3205, 2880, 3261, 1994, 3968, 4291, 4204, 4071, 4034, 1742, 2037, 352, 2820, 3912, 3287, 1218, 1190, 4145, 353, 2422, 354, 355, 925, 1782, 2184, 2261, 2490, 926, 927, 928, 4630, 2137, 3610, 356, 357, 4729, 358, 359, 4224, 1918, 1959, 1840, 3736, 1770, 929, 930, 931, 4155, 360, 361, 362, 932, 363, 364, 1279, 2289, 365, 1543, 366, 2156, 2472, 367, 4049, 1633, 1722, 368, 369, 1495, 1566, 370, 4967, 371, 372, 373, 1211, 1873, 2101, 2494, 1726, 374, 1442, 933, 1748, 4142, 1434, 1358, 1191, 3732, 4110, 4039, 4411, 4506, 4270, 4156, 3780, 4036, 4030, 4016, 1550, 3899, 1247, 1855, 1181, 3919, 1639, 3664, 1244, 4140, 3930, 4117, 4189, 4001, 3799, 3643, 3619, 1240, 1686, 1479, 1307, 1575, 4296, 1665, 3871, 4135, 1605, 4408, 3604, 1274, 4149, 1313, 3741, 1938, 3709, 1727, 3893, 1280, 3622, 1784, 3834, 1752, 1983, 1743, 3979, 4461, 4113, 3817, 4232, 1340, 1489, 4214, 3902, 1857, 2510, 2316, 1904, 1219, 1486, 1512, 1481, 1516, 3820, 3789, 4252, 4047, 4330, 4082, 4094, 1574, 1248, 4078, 1872, 1426, 3785, 3687, 4318, 4243, 3866, 3704, 4172, 1621, 4315, 1192, 1513, 1856, 2476, 3324, 2769, 2678, 1561, 3296, 375, 2348, 376, 377, 1395, 1584, 4093, 4453, 3940, 3778, 4374, 4210, 4009, 4264, 4339, 4368, 1738, 378, 1610, 4194, 4474, 4013, 4266, 1771, 1759, 1922, 3860, 3832, 1349, 1381, 3663, 1642, 1185, 4356, 3932, 1233, 4212, 3858, 1198, 4192, 3611, 1919, 1819, 3790, 3712, 1969, 4095, 1887, 4468, 1720, 4247, 934, 1790, 2002, 1657, 1663, 1336, 3894, 1554, 1494, 1405, 3576, 4314, 3695, 1851, 1850, 4362, 1815, 3845, 4511, 3656, 3638, 1406, 1596, 4454, 1443, 1661, 935, 4504, 1359, 1734, 3650, 1910, 1305, 1648, 3831, 4435, 1208, 1988, 4451, 1993, 1986, 3849, 1718, 4068, 1835, 1425, 1428, 1282, 4380, 1658, 1452, 1687, 4024, 379, 4072, 3791, 4491, 4323, 4014, 1304, 1440, 1511, 1981, 1676, 1547, 4422, 1283, 3861, 1383, 3644, 3691, 4259, 1749, 1418, 1176, 4216, 1387, 3992, 4423, 4253, 1618, 1871, 1256, 3748, 4119, 1297, 1586, 1251, 1299, 1954, 4450, 3990, 4029, 4097, 3890, 3796, 1389, 3711, 4344, 1578, 1476, 4343, 1202, 4413, 4384, 3808, 1647, 1475, 3892, 3674, 1739, 3926, 3595, 1943, 3756, 4405, 3973, 4109, 4159, 3744, 4387, 1960, 4275, 3781, 1535, 1210, 4492, 4365, 4118, 3655, 3886, 4278, 4383, 4485, 1392, 3751, 3931, 3986, 3678, 1249, 4353, 4208, 3710, 4238, 4213, 3969, 4436, 3175, 4128, 2970, 1228, 3534, 3437, 3406, 3641, 3639, 3954, 4335, 3995, 3582, 4475, 3784, 4470, 4010, 3802, 3941, 4427, 4396, 4348, 3587, 3818, 3864, 3956, 3863, 3731, 3814, 4067, 4354, 4350, 4334, 3821, 1932, 3929, 4171, 1258, 3824, 3631, 4465, 4494, 1320, 1398, 3828, 1204, 1223, 1284, 1685, 3773, 4209, 3014, 4462, 4246, 4190, 4312, 4023, 3760, 3753, 1178, 3884, 2783, 4038, 3545, 2916, 3112, 2834, 3880, 3673, 4102, 4399, 4048, 3752, 4207, 1235, 3943, 4355, 4087, 4100, 4327, 4037, 4163, 3918, 4486, 1243, 3933, 4178, 1662, 1643, 4152, 3634, 3617, 4445, 4303, 1370, 3838, 4199, 4284, 1213, 4382, 1399, 1187, 3714, 1828, 4487, 3615, 1842, 1501, 3746, 4018, 4420, 3606, 4121, 3724, 3935, 1941, 4419, 4282, 1955, 1949, 4310, 4488, 1577, 4127, 1288, 1171, 3670, 4052, 3627, 3777, 936, 1371, 3685, 1325, 1940, 380, 4482, 4258, 3812, 1581, 1860, 4124, 4508, 4500, 3652, 3972, 1309, 1630, 1528, 3717, 1217, 3692, 4430, 3764, 4316, 4285, 3645, 3971, 4421, 1172, 4026, 2740, 3125, 3546, 1725, 1206, 3842, 4404, 3690, 3962, 4513, 4340, 4329, 4410, 3703, 4136, 1763, 1487, 3589, 3907, 4153, 2707, 3730, 4426, 4180, 4041, 3923, 4444, 3851, 4429, 4361, 1441, 4394, 4302, 3758, 4510, 3742, 1868, 4077, 1710, 1939, 1335, 1666, 1407, 4187, 1193, 1188, 1196, 1724, 1717, 1200, 1646, 1997, 1975, 1701, 4280, 1613, 4006, 1984, 1351, 3653, 3833, 1593, 2561, 4442, 3900, 4298, 1761, 4388, 1820, 1597, 4317, 4249, 1341, 1203, 1680, 4441, 3628, 3725, 1945, 937, 4206, 1588, 1439, 3794, 4447, 1838, 3776, 3658, 4064, 1377, 4011, 4272, 4503, 1324, 1367, 3594, 3680, 1300, 1750, 938, 3913, 3774, 1877, 1987, 1862, 3998, 1380, 4185, 3686, 3696, 4463, 1350, 4008, 4230, 3853, 4244, 4083, 381, 1909, 3897, 1546, 382, 3613, 3273, 3452, 3525, 1229, 4105, 3835, 383, 1263, 1234, 3970, 1492, 3856, 3586, 1175, 4321, 4020, 4144, 1224, 1199, 3667, 2778, 4412, 4407, 1812, 1810, 3823, 1416, 1427, 1507, 1878, 4333, 3146, 4281, 4211, 1179, 3843, 1669, 1677, 1524, 1525, 1974, 384, 1979, 1456, 1239, 4167, 3740, 1876, 1388, 1967, 1474, 385, 1342, 1471, 4176, 1232, 1989, 4125, 1741, 1508, 1580, 4060, 4378, 1576, 1212, 1893, 3921, 3585, 1174, 1396, 4061, 4015, 1207, 3698, 3825, 3922, 4021, 4181, 1598, 1916, 1429, 4502, 4231, 1321, 4390, 3693, 3734, 1382, 3684, 1747, 3806, 3896, 3635, 1768, 4025, 3976, 3840, 3963, 4286, 1502, 3836, 4161, 3659, 3743, 4130, 3605, 1385, 1783, 4392, 4328, 1316, 4173, 4265, 1246, 1985, 1629, 1829, 1737, 3826, 1473, 1992, 1883, 1656, 1837, 1914, 1839, 1834, 3984, 4495, 3910, 4160, 3671, 4184, 4132, 4250, 1503, 1237, 1523, 1417, 4063, 1562, 3977, 1971, 1707, 1847, 1792, 3769, 4074, 1534, 4239, 4003, 3915, 1689, 1776, 1599, 1265, 1410, 1823, 1498, 1329, 939, 386, 387, 1655, 3874, 4261, 3626, 1791, 3579, 1644, 3936, 4054, 4260, 4359, 4131, 4297, 4357, 4022, 3770, 4046, 1222, 1996, 3788, 4169, 1925, 3953, 4228, 4226, 4277, 4101, 1889, 1369, 3797, 4088, 4019, 3771, 3632, 1402, 388, 1520, 1767, 1466, 1194, 4137, 1908, 1927, 1758, 3772, 3661, 4186, 4174, 1170, 3850, 1315, 1611, 1530, 1859, 2209, 4183, 1408, 1403, 941, 4033, 3623, 3596, 1461, 1848, 1173, 1928, 1459, 1765, 1826, 3719, 1931, 3584, 4004, 3591, 3967, 4168, 3957, 3878, 4165, 4191, 3980, 4058, 4200, 4336, 3958, 1260, 4051, 3798, 4032, 1774, 4322, 3991, 4106, 1641, 1570, 3978, 3965, 4464, 3813, 4154, 1365, 4257, 3846, 4345, 4379, 3603, 1693, 3937, 3801, 1787, 1214, 4483, 4201, 1898, 1845, 1226, 1220, 4245, 1347, 3867, 1900, 3640, 3916, 4089, 1209, 3745, 3988, 3975, 4236, 4075, 4146, 4256, 4308, 4000, 4148, 3588, 3868, 4403, 3883, 4326, 4393, 3895, 4237, 3955, 3727, 4005, 4092, 4372, 4283, 1553, 3805, 4151, 1281, 1681, 4489, 3982, 4437, 3597, 4342, 3872, 3987, 4490, 3876, 3668, 4300, 1679, 1242, 3598, 3583, 3647, 389, 4304, 3793, 3779, 1937, 1907, 4042, 3648, 3996, 3800, 4367, 4099, 1807, 3887, 4428, 1625, 1390, 1884, 1682, 4364, 4306, 3869, 1278, 1672, 942, 1505, 1542, 1709, 1915, 3600, 3914, 1968, 3948, 1670, 3811, 1865, 1362, 943, 1716, 3961, 1506, 4221, 1376, 944, 1683, 4276, 1445, 1721, 1632, 3607, 1328, 1455, 1913, 1497, 1317, 1951, 1778, 1379, 3768, 4225, 1668, 945, 390, 391, 4406, 4341, 1480, 392, 393, 394, 395, 1714, 1422, 396, 2043, 946, 2265, 397, 3618, 4433, 1177, 3898, 398, 2251, 947, 948, 2212, 949, 950, 399, 951, 400, 1965, 4640, 2345, 4471, 952, 953, 401, 402, 2475, 403, 404, 4758, 954, 955, 2437, 4139, 1482, 3602, 4434, 3721, 1592, 1825, 1698, 1519, 1352, 4202, 4409, 1977, 1917, 405, 406, 407, 408, 956, 957, 2267, 1631, 1684, 409, 2054, 3889, 958, 410, 2117, 411, 959, 412, 960, 2443, 4712, 4619, 2285, 413, 414, 415, 961, 2352, 2417, 962, 1905, 416, 963, 417, 418, 2382, 3675, 1833, 3974, 419, 964, 420, 421, 965, 966, 967, 4919, 968, 2365, 969, 970, 422, 1897, 2056, 2309, 1272, 4754, 2207, 971, 423, 4133, 3830, 4865, 972, 424, 973, 425, 2068, 4955, 426, 974, 2109, 2380, 427, 1708, 4676, 428, 4141, 429, 430, 3749, 431, 1619, 975, 4044, 3590, 1944, 4126, 1923, 1706, 432, 976, 977, 978, 4867, 4400, 433, 434, 1606, 2143, 979, 435, 980, 2604, 2895, 981, 436, 3448, 4959, 4563, 2188, 437, 438, 2055, 1692, 982, 2388, 2243, 983, 2035, 2120, 4940, 439, 440, 441, 2474, 4900, 2052, 4764, 3862, 4055, 4358, 984, 2435, 4589, 2276, 2401, 985, 1664, 443, 2073, 2405, 986, 4309, 4045, 3854, 3682, 2491, 444, 445, 1972, 2688, 4366, 3425, 3231, 3649, 2759, 2724, 3873, 3755, 1216, 3599, 3775, 2754, 2606, 3471, 3234, 2565, 2803, 2562, 2684, 3411, 3405, 2690, 1255, 3694, 446, 3985, 3535, 1306, 4084, 3282, 447, 1353, 2168, 1780, 987, 988, 989, 2126, 448, 449, 2107, 450, 2031, 990, 451, 452, 991, 1485, 2242, 453, 2286, 992, 1728, 993, 4703, 994, 995, 454, 1696, 996, 2039, 455, 997, 4874, 998, 3116, 1869, 456, 4759, 2500, 4798, 2262, 4562, 457, 1386, 999, 458, 4768, 4982, 4778, 2040, 1000, 4981, 3879, 2698, 459, 460, 1001, 461, 1447, 462, 1002, 2042, 2339, 1003, 463, 464, 4425, 1645, 465, 1004, 466, 2328, 467, 468, 469, 1231, 1468, 470, 471, 2496, 472, 473, 1005, 474, 475, 2108, 4725, 1006, 476, 1273, 1007, 1744, 1488, 1659, 477, 478, 4598, 1604, 4753, 2493, 479, 1008, 1009, 480, 1010, 1011, 1012, 1013, 1014, 481, 4313, 482, 483, 1499, 484, 1015, 4761, 2091, 2386, 2513, 1016, 4073, 1777, 2172, 485, 2205, 4592, 4545, 4720, 486, 1458, 4274, 2122, 4905, 4796, 2152, 4539, 4528, 4904, 4842, 4986, 4639, 4846, 4623, 4650, 4595, 2195, 4681, 487, 2182, 4710, 1775, 2083, 4205, 1526, 4586, 1697, 1017, 2000, 4692, 4795, 2480, 2017, 488, 2335, 489, 4969, 1894, 1882, 1817, 1880, 490, 1018, 3917, 3616, 4311, 1800, 4473, 4085, 4401, 1310, 3783, 3765, 1538, 3870, 491, 1948, 3699, 1735, 3792, 4290, 2074, 492, 5001, 2136, 493, 2211, 4532, 494, 2421, 495, 4090, 2378, 2104, 2210, 2247, 2478, 2047, 496, 4620, 4978, 4614, 1019, 2012, 1803, 3642, 497, 1322, 4752, 1020, 498, 1021, 2235, 2302, 2488, 4665, 4699, 4608, 4781, 499, 2049, 2404, 4685, 500, 501, 1022, 502, 1333, 503, 1023, 4686, 4804, 504, 4727, 505, 506, 4938, 4805, 2065, 1890, 4891, 1024, 507, 508, 509, 2110, 1025, 510, 1026, 3608, 1732, 511, 2397, 1864, 1816, 1531, 512, 513, 2451, 3636, 5012, 4892, 514, 1699, 4593, 1027, 4987, 515, 2495, 4660, 1028, 516, 1029, 2409, 1366, 2112, 2178, 2124, 2376, 5011, 4572, 4957, 4789, 4543, 4664, 4678, 2093, 4746, 2489, 4922, 2145, 1030, 4832, 4950, 1261, 4027, 3478, 3763, 2959, 1293, 2462, 517, 3197, 1595, 3413, 2067, 1031, 2228, 1448, 518, 4698, 4616, 2057, 2305, 2133, 2061, 4526, 4617, 1032, 1033, 2429, 2311, 1675, 1797, 519, 4578, 2271, 4693, 4604, 2466, 2148, 2420, 520, 4854, 2381, 2315, 2284, 4813, 521, 1034, 522, 523, 1999, 3759, 1215, 4122, 1730, 524, 525, 526, 3966, 4573, 5008, 1035, 527, 4973, 2508, 528, 3911, 529, 3289, 1821, 530, 531, 2426, 1036, 532, 1874, 533, 534, 1037, 535, 1038, 536, 1039, 537, 538, 539, 1040, 3767, 1929, 1041, 1042, 3683, 2100, 4853, 2300, 2165, 540, 2105, 541, 1043, 4906, 542, 1338, 2292, 2021, 1616, 1901, 1796, 1517, 4331, 4332, 4466, 2719, 3803, 4123, 4233, 1824, 3129, 3087, 3505, 4158, 4254, 1449, 2121, 1044, 3720, 4351, 4414, 1673, 3453, 3254, 2501, 1649, 543, 544, 545, 546, 1045, 547, 2225, 4240, 3580, 4680, 1046, 548, 549, 1047, 550, 2598, 551, 552, 553, 3819, 1259, 4062, 1048, 554, 2841, 1049, 1050, 3515, 2219, 1433, 1323, 4301, 555, 556, 1051, 557, 558, 1052, 1053, 3738, 1567, 559, 1054, 1270, 3857, 1055, 2151, 560, 2175, 2089, 1056, 4514, 2198, 2193, 1257, 1238, 3662, 561, 2186, 1057, 4637, 562, 1058, 563, 4872, 2097, 2436, 564, 1059, 565, 566, 1060, 1061, 2231, 4203, 1899, 3981, 1062, 1303, 4116, 567, 1063, 568, 569, 570, 2367, 1946, 3620, 1064, 1514, 4002, 3679, 3964, 3707, 3666, 1348, 4273, 1804, 4497, 571, 1401, 4438, 1895, 1264, 572, 1912, 573, 3939, 4170, 4056, 1271, 1065, 1521, 1221, 1066, 1451, 1654, 3934, 4080, 4352, 574, 1700, 3739, 1565, 1419, 1811, 3950, 1690, 1397, 3716, 1569, 1465, 1437, 1674, 4337, 1285, 4268, 1183, 3726, 3881, 4134, 4347, 4012, 3938, 4066, 4198, 4416, 4164, 3630, 4229, 4292, 4193, 4325, 4375, 4371, 4432, 4215, 1753, 3944, 1409, 4195, 1729, 4223, 1540, 4455, 1068, 1069, 4512, 1723, 1070, 3750, 3633, 4070, 4104, 4162, 4235, 1863, 4346, 1881, 1071, 1814, 1572, 575, 4443, 3761, 1346, 1587, 1072, 3592, 576, 1891, 4469, 1275, 577, 1950, 1963, 4129, 1073, 1296, 1360, 1551, 3733, 4111, 3993, 4108, 3949, 1287, 1713, 1556, 1736, 1995, 1435, 1424, 1830, 1705, 1861, 1197, 1254, 4120, 1545, 4417, 1469, 1292, 2185, 2279, 1785, 1236, 4293, 1827, 3839, 3983, 4395, 1957, 2222, 578, 3928, 4295, 3715, 3855, 3609, 1990, 4076, 4175, 3927, 1757, 1650, 4299, 1773, 2004, 1267, 1364, 579, 1462, 1879, 4007, 3729, 3665, 3722, 1691, 1712, 1074, 1624, 1751, 1394, 3924, 3952, 580, 581, 2003, 1343, 2203, 1559, 1250, 1555, 2304, 582, 2395, 4114, 1818, 1075, 583, 1076, 1077, 1704, 4448, 584, 4882, 1078, 1079, 1786, 585, 3354, 1832, 586, 3432, 2891, 587, 588, 4583, 2505, 1903, 2077, 4936, 4658, 4830, 2446, 1080, 2278, 1081, 1082, 4459, 1083, 589, 1563, 1084, 2113, 590, 591, 1085, 2256, 592, 2308, 593, 594, 2274, 595, 4931, 2407, 1858, 597, 598, 1453, 2559, 2590, 2738, 4478, 4069, 1809, 1327, 4150, 3260, 3481, 3672, 3625, 2008, 4439, 3852, 3997, 1411, 599, 3847, 4993, 1268, 4050, 3377, 4424, 1496, 4143, 4493, 3492, 1962, 1412, 2455, 600, 2457, 2321, 1086, 601, 4017, 4477, 1794, 2483, 4776, 2291, 602, 4263, 3072, 2009, 2199, 1754, 1087, 1088, 3888, 603, 604, 4777, 2324, 605, 1368, 3827, 4103, 606, 607, 1089, 2220, 4549, 1090, 1571, 1091, 1438, 608, 1092, 609, 2320, 2069, 610, 611, 1093, 612, 1094, 3701, 4389, 613, 4897, 1603, 614, 1095, 2154, 5000, 615, 616, 2263, 1332, 1715, 4369, 1652, 1096, 617, 1541, 618, 1921, 1733, 1373, 1870, 619, 4218, 1798, 2387, 1097, 1098, 1099, 1100, 620, 1702, 621, 622, 4855, 4847, 2398, 2239, 1101, 1667, 1384, 623, 4745, 3700, 1788, 1600, 624, 2098, 625, 4550, 4721, 4960, 4878, 2473, 4792, 4675, 1102, 1423, 626, 2771, 627, 1339, 3875, 628, 629, 3070, 4565, 2118, 2015, 4818, 4860, 2557, 2795, 2906, 2103, 4869, 2029, 3299, 3118, 4932, 4838, 4901, 4908, 4996, 4779, 2377, 4657, 4646, 4875, 4627, 4515, 4876, 4965, 4605, 4576, 2028, 4985, 4799, 4850, 1103, 4757, 4747, 1614, 1947, 2237, 630, 631, 4997, 4618, 4479, 3766, 632, 1104, 1105, 4886, 1106, 2432, 4827, 633, 1107, 4530, 634, 2371, 1108, 4536, 635, 1813, 636, 2431, 4866, 4991, 4814, 4560, 4956, 637, 4555, 1109, 4941, 4633, 2213, 638, 639, 3706, 1110, 640, 1111, 641, 4581, 4893, 4831, 2481, 4644, 4734, 2190, 4524, 4881, 4837, 4888, 4648, 642, 4548, 4807, 4896, 4868, 2374, 1112, 4823, 2164, 1113, 3735, 3390, 1694, 3431, 2838, 3483, 3464, 3848, 2558, 3314, 3086, 3029, 2956, 3517, 2651, 2914, 2680, 2632, 3121, 3100, 3528, 3526, 3084, 4220, 3304, 2846, 1186, 3235, 2903, 3559, 2687, 3409, 3237, 2900, 2999, 3349, 3171, 2752, 3262, 3504, 3047, 4376, 3193, 3430, 2525, 2670, 2911, 3508, 2776, 2697, 3200, 2790, 3323, 2543, 2874, 2614, 3904, 3373, 3054, 2617, 4242, 3621, 2708, 4179, 4398, 3959, 4935, 1269, 3095, 1286, 3624, 4481, 1432, 3511, 2735, 4381, 3295, 1585, 2390, 1568, 1114, 1766, 3221, 2643, 2739, 643, 4735, 4629, 1115, 4918, 4688, 3920, 644, 4723, 4949, 4748, 4607, 4719, 1116, 645, 646, 4611, 2353, 4603, 4762, 4819, 2221, 4636, 4992, 4998, 2307, 647, 1801, 4279, 3762, 1637, 1509, 4843, 4797, 4590, 4516, 4995, 4541, 2200, 4580, 4858, 648, 649, 2502, 2477, 4724, 4551, 4674, 1118, 1119, 2965, 2369, 2695, 3293, 650, 651, 4730, 4862, 4722, 4944, 1120, 652, 1121, 4983, 4784, 4877, 4643, 653, 654, 4909, 1122, 3264, 655, 2076, 4849, 656, 657, 2447, 658, 659, 2191, 4035, 2910, 3391, 2808, 3099, 2913, 3676, 2852, 3284, 2731, 1609, 2375, 2201, 3537, 3994, 1319, 4467, 1802, 1227, 1623, 660, 4844, 4714, 4979, 4812, 2192, 1123, 661, 2364, 662, 663, 664, 1124, 1125, 665, 2487, 4899, 2138, 1126, 666, 667, 4569, 4917, 2322, 1127, 1128, 1129, 668, 669, 1130, 670, 1131, 1527, 1132, 671, 1772, 2314, 1133, 1134, 2470, 1135, 672, 2236, 4716, 673, 4600, 2196, 674, 2456, 4588, 4963, 4851, 4558, 4557, 4697, 4610, 4773, 4687, 4708, 4910, 2123, 1136, 1137, 2358, 5005, 2208, 4952, 4945, 1933, 1731, 1793, 675, 676, 3342, 1138, 1139, 677, 4840, 4597, 4870, 1140, 4990, 4954, 4916, 678, 1141, 4737, 4527, 2253, 4531, 679, 1142, 1143, 680, 4771, 1144, 4638, 681, 4705, 4525, 4522, 4898, 2325, 2415, 5004, 1145, 682, 683, 2141, 1146, 684, 685, 2445, 686, 687, 4861, 688, 3822, 689, 690, 4743, 691, 1147, 1601, 692, 1148, 693, 4537, 4825, 4625, 4621, 3905, 694, 695, 1414, 1149, 696, 2027, 2159, 4756, 4690, 4859, 4793, 4575, 2160, 4828, 4731, 4718, 4802, 4750, 1150, 2081, 2258, 697, 1795, 1372, 1695, 1866, 1151, 4115, 1719, 2280, 4662, 698, 2176, 2217, 1920, 699, 700, 701, 4999, 1544, 4739, 2512, 702, 703, 4031, 4305, 1636, 1393, 2010, 3810, 4452, 3677, 4227, 1277, 1400, 4402, 4157, 4197, 1337, 1253, 1532, 4028, 3989, 2449, 4715, 704, 2050, 1493, 1854, 1902, 1510, 1152, 2340, 4182, 706, 4652, 2442, 2484, 707, 708, 709, 4667, 1153, 2412, 4732, 4476, 2053, 710, 1375, 711, 712, 713, 4829, 4738, 4811, 4570, 1245, 714, 2045, 4707, 715, 2169, 4713, 1841, 4234, 4924, 1154, 1314, 4096, 2023, 717, 4895, 2414, 718, 1155, 719, 720, 2063, 1311, 4921, 721, 4833, 4903, 4885, 4666, 2249, 4217, 1156, 723, 1157, 1627, 2116, 4566, 2287, 1158, 2330, 4826, 4622, 4740, 724, 4700, 725, 1159, 5013, 4894, 726, 2434, 1953, 1160, 1201, 727, 3787, 2046, 1161, 728, 729, 2485, 2044, 4568, 3747, 2248, 730, 731, 1846, 2507, 2368, 1162, 2019, 2333, 3815, 2005, 2266, 1964, 2347, 732, 2177, 2059, 4958, 4927, 1822, 4815, 1262, 2094, 4480, 1537, 1291, 2419, 1318, 4628, 4294, 2486, 4926, 1582, 2162, 733, 4587, 734, 735, 3439, 2833, 4287, 4509, 4505, 4267, 3697, 3272, 4112, 2967, 3651, 1991, 1805, 1628, 3705, 2479, 736, 1195, 4863, 1163, 3859, 1164, 2394, 1165, 2355, 2351, 4679, 4835, 2259, 4839, 2275, 1166, 4968, 4912, 2423, 737, 1167, 4989, 4684, 4612, 2127, 1745, 1973, 4767, 1168, 2273, 2310, 3807, 4307, 1169, 2303, 1454, or 1781.

[0218] A VP capsid polypeptide may have a 581 to 589 region having a sequence of SEQ ID NO: 5014, wherein X⁶ of SEQ ID NO: 5014 is not D. In some embodiments, the 581 to 589 region has a sequence of any one of SEQ ID NOs: 2498, 4884, 738, 739, 4177, 1289, 740, 14, 15, 741, 742, 743, 16, 744, 17, 18, 745, 3477, 1548, 3051, 2982, 2171, 2877, 746, 19, 20, 3036, 3426, 3073, 3169, 747, 2406, 3362, 2784, 2469, 4889, 21, 3192, 4942, 22, 23, 1638, 748, 24, 25, 749, 26, 27, 1703, 1836, 28, 2038, 2301, 3660, 29, 750, 30, 31, 2095, 1640, 33, 34, 35, 36, 37, 4742, 2450, 38, 4925, 39, 751, 752, 1653, 1205, 3795, 753, 4288, 4219, 2770, 2962, 4241, 4107, 2718, 3317, 4391, 4053, 3263, 2553, 3947, 2710, 2608, 3467, 2796, 2961, 2529, 3320, 2674, 2635, 3446, 3053, 3250, 3688, 1182, 1998, 4320, 3351, 2655, 3514, 2779, 3194, 3319, 3224, 3281, 3708, 2807, 3562, 3274, 3374, 3013, 3416, 2981, 3065, 2777, 3469, 2977, 2638, 2972, 3059, 2574, 3380, 4262, 3167, 3368, 2781, 3547, 3386, 1225, 2960, 3485, 3370, 3443, 2824, 754, 1467, 3327, 3178, 3006, 3252, 2991, 3470, 2888, 2572, 3418, 2642, 2519, 3363, 40, 2633, 41, 42, 43, 755, 2511, 44, 45, 756, 46, 757, 47, 48, 1952, 758, 2341, 2410, 49, 3122, 2551, 3718, 4806, 2216, 3484, 3577, 759, 2072, 2034, 50, 1308, 1230, 3960, 1378, 2994, 3080, 2589, 3681, 51, 4694, 2257, 2167, 52, 760, 53, 2389, 4934, 4951, 4755, 761, 4591, 762, 4659, 54, 2146, 3925, 55, 3654, 2087, 2346, 4766, 4682, 4984, 4744, 56, 763, 764, 4626, 4702, 57, 58, 59, 60, 61, 4086, 1740, 1660, 765, 766, 62, 1966, 2032, 2499, 2332, 767, 63, 2096, 2181, 4913, 2438, 2041, 64, 768, 769, 770, 2384, 2402, 771, 65, 66, 67, 772, 2458, 2197, 68, 3816, 69, 2599, 2706, 2497, 70, 2234, 2183, 2399, 71, 4769, 2366, 72, 73, 74, 3865, 1549, 1361, 2453, 3882, 773, 3713, 1942, 2140, 75, 1312, 4501, 76, 77, 774, 1413, 775, 776, 78, 1560, 4289, 3757, 79, 3593, 4043, 1806, 3908, 4397, 1615, 4415, 3723, 2006, 3754, 1470, 4360, 80, 3945, 2854, 3523, 3669, 1356, 777, 2132, 81, 82, 4065, 83, 84, 2030, 1294, 2413, 2064, 1484, 2299, 85, 4594, 86, 778, 87, 3891, 4456, 4040, 4496, 1982, 2001, 1478, 1189, 88, 1490, 1885, 1926, 89, 90, 91, 779, 2270, 780, 2161, 1180, 92, 781, 782, 783, 2356, 784, 785, 786, 94, 95, 787, 788, 1831, 1867, 96, 4458, 97, 1970, 4656, 2173, 1936, 2349, 1590, 4585, 98, 99, 100, 789, 790, 1298, 101, 1688, 791, 792, 2007, 4556, 2070, 102, 793, 4632, 103, 794, 795, 104, 105, 106, 2229, 796, 4691, 107, 2440, 1849, 108, 797, 4736, 2509, 2018, 2227, 4787, 109, 1579, 110, 1906, 111, 2428, 798, 2075, 112, 2411, 113, 2359, 799, 4848, 800, 2461, 1444, 2313, 2350, 4579, 4821, 801, 114, 2329, 4864, 4834, 115, 1344, 116, 802, 117, 118, 119, 4929, 4677, 120, 4791, 2158, 121, 803, 804, 1463, 805, 122, 2139, 2290, 1760, 2465, 123, 2424, 2058, 2230, 124, 4717, 806, 125, 126, 2370, 127, 4521, 128, 4971, 4994, 807, 4533, 129, 130, 131, 132, 4933, 808, 2336, 2026, 2204, 809, 810, 2281, 133, 1978, 134, 811, 812, 135, 136, 137, 138, 813, 814, 139, 4673, 140, 815, 1326, 141, 142, 143, 2344, 5009, 144, 145, 816, 4654, 2125, 4663, 4810, 4816, 1634, 1302, 817, 146, 818, 147, 148, 149, 4546, 150, 151, 152, 153, 154, 155, 819, 820, 156, 2149, 157, 2295, 821, 158, 160, 161, 4631, 2441, 162, 163, 164, 165, 166, 822, 167, 168, 169, 170, 171, 823, 172, 4613, 824, 1651, 173, 1483, 174, 175, 825, 176, 177, 178, 179, 4624, 4809, 4520, 180, 826, 827, 181, 828, 4695, 2130, 4911, 182, 4582, 4873, 4596, 2020, 2189, 183, 4641, 829, 184, 185, 2244, 4647, 186, 187, 188, 189, 190, 830, 191, 192, 193, 194, 2071, 4615, 2361, 195, 4852, 4914, 4947, 196, 1391, 197, 4534, 4726, 198, 199, 4920, 831, 2240, 2223, 200, 201, 202, 203, 2106, 2503, 4775, 204, 205, 832, 833, 206, 834, 2232, 2294, 207, 2166, 208, 209, 210, 835, 836, 1334, 837, 3901, 3312, 2649, 1301, 211, 212, 1450, 4386, 3028, 213, 1446, 214, 2206, 215, 1896, 1522, 3490, 838, 216, 2090, 2241, 217, 218, 4653, 219, 1612, 220, 221, 222, 839, 223, 4953, 4974, 4790, 4915, 2464, 4567, 4774, 4964, 2360, 840, 224, 4928, 4741, 225, 2088, 4751, 5007, 4542, 226, 227, 4890, 4519, 4883, 228, 4786, 229, 230, 231, 2448, 841, 842, 232, 233, 4782, 234, 4962, 2269, 843, 235, 844, 236, 237, 4930, 845, 846, 238, 847, 4704, 239, 848, 849, 2150, 850, 851, 852, 853, 1536, 240, 854, 241, 242, 243, 244, 245, 246, 247, 248, 4923, 2245, 4696, 855, 4634, 856, 249, 250, 251, 252, 253, 254, 255, 857, 2115, 2218, 256, 257, 258, 259, 858, 859, 260, 261, 860, 861, 862, 262, 4966, 863, 864, 263, 4749, 4970, 2296, 2318, 4535, 865, 2326, 264, 1241, 265, 266, 866, 1477, 267, 867, 268, 868, 269, 4668, 270, 869, 870, 271, 871, 872, 272, 4822, 4709, 873, 4655, 4972, 2317, 874, 1252, 273, 1591, 4975, 875, 274, 2025, 275, 1980, 276, 876, 877, 2066, 277, 278, 279, 4670, 280, 2323, 2288, 2334, 4939, 4689, 281, 878, 2416, 1892, 879, 1539, 2214, 2215, 880, 2327, 881, 882, 4601, 1295, 3601, 3877, 1930, 1420, 1678, 1460, 2306, 884, 282, 1799, 283, 284, 4988, 4871, 4553, 4772, 2260, 285, 1626, 885, 286, 1374, 886, 2119, 2504, 2468, 287, 2408, 1620, 1290, 2425, 2482, 4564, 4671, 2282, 288, 1354, 2033, 289, 887, 290, 888, 291, 1956, 2362, 2467, 889, 2357, 4547, 4765, 292, 4794, 2391, 4324, 293, 890, 294, 295, 4138, 891, 2297, 2254, 296, 2224, 3903, 297, 892, 3829, 298, 299, 3809, 4271, 3844, 1436, 300, 1515, 1617, 4701, 2174, 301, 1961, 4649, 5010, 302, 2060, 303, 304, 305, 2452, 2147, 4574, 4538, 306, 2293, 1589, 893, 4946, 4370, 4841, 2342, 307, 308, 309, 894, 2246, 2155, 3646, 4059, 1431, 1331, 311, 4836, 4948, 312, 895, 1779, 313, 314, 315, 316, 896, 1558, 1552, 317, 2312, 318, 319, 897, 320, 898, 321, 322, 899, 1958, 2022, 2016, 900, 2454, 323, 2427, 2134, 324, 901, 325, 902, 326, 2373, 4803, 2459, 1491, 327, 328, 903, 2463, 2264, 329, 330, 1635, 4820, 905, 331, 4706, 2092, 4484, 1756, 906, 907, 4661, 2179, 4584, 4609, 332, 4907, 4635, 4529, 4683, 4561, 333, 2337, 3536, 2701, 2799, 3332, 3294, 3159, 3069, 2637, 3025, 2782, 3247, 3350, 2692, 2586, 3004, 3049, 2694, 2650, 3554, 2983, 3403, 3214, 3163, 2541, 3090, 3097, 3462, 1430, 2941, 3486, 2842, 3558, 3104, 3037, 3419, 2780, 2931, 1276, 2928, 2609, 3068, 3128, 2548, 2538, 2618, 2789, 3228, 2657, 3189, 2128, 2863, 3307, 3300, 2546, 3048, 3543, 2946, 2975, 3346, 3067, 2728, 2955, 3408, 3027, 3094, 3203, 2988, 2751, 2953, 2566, 2578, 2823, 3063, 3335, 3000, 3181, 3011, 3138, 3389, 2805, 3074, 2894, 3149, 2560, 3417, 3265, 3378, 2901, 2837, 2822, 2745, 3473, 3530, 3040, 2597, 3509, 3522, 3161, 2926, 3209, 3105, 3400, 2630, 2905, 2671, 2818, 2806, 2702, 2709, 2400, 3549, 3538, 2534, 2773, 2623, 3491, 3243, 3136, 2693, 3164, 3343, 2918, 2555, 2794, 2679, 3510, 3110, 2672, 3442, 2929, 3184, 3488, 2135, 4763, 3414, 3093, 2996, 3141, 3544, 3102, 2856, 2957, 3466, 3461, 2788, 2660, 3344, 3204, 2720, 3379, 2826, 1789, 2396, 2785, 3249, 3527, 4460, 3352, 2051, 2569, 4457, 2011, 4857, 2163, 4783, 4319, 3906, 1533, 1755, 1888, 4248, 1557, 3804, 1363, 1934, 1602, 1404, 4188, 1330, 4349, 3337, 3533, 2629, 3038, 2539, 3567, 3291, 3348, 3115, 3359, 2993, 3079, 3506, 2527, 2963, 2938, 2516, 3113, 1345, 2639, 3143, 3044, 2747, 3154, 3280, 3039, 2743, 2902, 3056, 2554, 2522, 3103, 3210, 3434, 2656, 4251, 4166, 4196, 3206, 3328, 2588, 3553, 2714, 3078, 3222, 3137, 3357, 2717, 2944, 3012, 3220, 3202, 2811, 3083, 3269, 3566, 2699, 2515, 3023, 2533, 3288, 3075, 3005, 2685, 3058, 2976, 2622, 3333, 3463, 2939, 3521, 3268, 3117, 2626, 2616, 3240, 2570, 3565, 2919, 3157, 2849, 3444, 2631, 3420, 2659, 3325, 3186, 2920, 3258, 3440, 3457, 3310, 2761, 3134, 2621, 3531, 2711, 2774, 2867, 2585, 3155, 2620, 3156, 2844, 3126, 3160, 2909, 3542, 3225, 2887, 3474, 3218, 2744, 2896, 3135, 3424, 3498, 3529, 2661, 2667, 2549, 2819, 2768, 2935, 3182, 2772, 3230, 3043, 2922, 3581, 3524, 2869, 2610, 3298, 2775, 3108, 2603, 3614, 2612, 2860, 3187, 3238, 3786, 4385, 3016, 3436, 2876, 2987, 3532, 3438, 3561, 3259, 2663, 2890, 3433, 3071, 3018, 2580, 2755, 3015, 2540, 3398, 2664, 2583, 2830, 2644, 2641, 3513, 2725, 2723, 3338, 3556, 2866, 2514, 2932, 2753, 2862, 2899, 2605, 2989, 3096, 3124, 2985, 2716, 3145, 3017, 2591, 2640, 3033, 1853, 3216, 3316, 3412, 2971, 3256, 3153, 3575, 3339, 2915, 2531, 3552, 3475, 3060, 3375, 2756, 3382, 2847, 2859, 3251, 3702, 3423, 2537, 2801, 3076, 2696, 3092, 3459, 3144, 3441, 2802, 3479, 2907, 3512, 3518, 3021, 2871, 3032, 2647, 2945, 3045, 2763, 3313, 3034, 3315, 3541, 2746, 2669, 2524, 3003, 2732, 3166, 3046, 3306, 2873, 3364, 3253, 3215, 3061, 2804, 2722, 2964, 2990, 2836, 4098, 4449, 3173, 2762, 3737, 2628, 3507, 2564, 3031, 2872, 3360, 2658, 2930, 2904, 3244, 3217, 3311, 3445, 2840, 3372, 2958, 3098, 3356, 3456, 3388, 2624, 3207, 2576, 2742, 2665, 2815, 3052, 3421, 2593, 3242, 2535, 2966, 2898, 2858, 2943, 2668, 2798, 3196, 2528, 2713, 3001, 2691, 2948, 2767, 2544, 3302, 2734, 2893, 2592, 2861, 3502, 2969, 2582, 3229, 2676, 2545, 3255, 3330, 2547, 3257, 2882, 3151, 3088, 2883, 3318, 2645, 2733, 2587, 3500, 3008, 2715, 2845, 3183, 2654, 3233, 3267, 2741, 2827, 2704, 3091, 2832, 2736, 3177, 3271, 2835, 2908, 3176, 2947, 3292, 3191, 2517, 3026, 3082, 3392, 3381, 2584, 2712, 3213, 3451, 2634, 3150, 2810, 3303, 2573, 3460, 2615, 3394, 2828, 3329, 4377, 4499, 3555, 2974, 3782, 3629, 3578, 3885, 2817, 3248, 2954, 3334, 3571, 3345, 3551, 3384, 3422, 1357, 1844, 2530, 2973, 4418, 4081, 3951, 1764, 1671, 1852, 334, 1843, 3449, 3185, 3399, 2786, 3055, 3472, 3397, 2601, 3564, 3277, 4373, 3548, 3179, 3407, 3841, 3347, 3142, 4255, 4431, 3241, 3077, 2700, 3147, 2648, 3283, 2829, 3278, 2581, 2536, 4363, 2848, 3410, 2797, 2523, 2520, 2721, 3496, 2571, 3198, 3219, 3030, 2673, 2921, 3837, 3301, 3322, 2705, 3239, 2949, 3369, 3396, 2892, 2897, 2766, 3174, 3297, 2550, 2889, 2933, 2793, 2627, 2677, 3119, 2596, 3226, 3172, 3089, 2868, 2839, 3942, 3120, 3286, 2843, 3465, 1564, 3946, 4222, 1504, 3999, 2682, 1875, 2865, 3539, 3168, 2864, 3308, 3557, 2940, 3109, 3503, 2625, 3455, 3114, 2595, 3331, 2978, 2518, 2521, 4079, 3024, 3573, 2952, 2653, 1769, 3180, 2813, 2652, 2600, 2816, 3201, 3188, 3270, 2997, 2992, 3009, 3520, 2936, 3275, 3165, 3447, 3131, 3305, 2809, 2792, 2729, 2814, 2619, 3266, 2825, 3066, 2857, 2998, 3064, 2681, 3035, 3279, 2764, 3480, 3127, 2912, 3010, 2607, 3211, 3111, 3041, 1573, 3909, 4269, 3487, 3489, 3019, 335, 1266, 1415, 2980, 3428, 2444, 3435, 3482, 3020, 2748, 2646, 2787, 2760, 2563, 3085, 3133, 3158, 3170, 2703, 3494, 2556, 2552, 3395, 3245, 3404, 2675, 2791, 2252, 4845, 1911, 4856, 2363, 908, 1935, 4711, 4728, 2460, 4517, 2749, 3341, 3355, 2575, 2942, 2886, 2758, 2594, 3495, 2884, 3516, 3042, 2737, 2923, 3563, 2855, 3476, 2611, 2937, 3383, 3497, 3402, 3162, 2662, 2875, 3223, 2878, 2079, 1808, 3285, 2757, 3057, 2951, 3519, 2579, 2853, 3387, 3401, 3493, 3393, 1608, 3365, 2885, 3574, 3081, 3007, 3568, 3152, 3367, 3358, 336, 2268, 3468, 3290, 3550, 3132, 2726, 2879, 3190, 3309, 2613, 2765, 3106, 1355, 3454, 2851, 2881, 3232, 3458, 3326, 3353, 2927, 3212, 2950, 3376, 3208, 3062, 3612, 3195, 3385, 2686, 2602, 3569, 3123, 2727, 1622, 2821, 2636, 2750, 2850, 3050, 2925, 3336, 3540, 2689, 3139, 2526, 3361, 3022, 3427, 3107, 3140, 3371, 3276, 2831, 3501, 2924, 3366, 3199, 3101, 3321, 3499, 2917, 2683, 2800, 2812, 3340, 3227, 3148, 3657, 4446, 1746, 1464, 1886, 2666, 3246, 3130, 3560, 3236, 2730, 3572, 1607, 3689, 2968, 1457, 1500, 337, 1184, 3450, 2577, 2567, 2532, 3415, 2934, 2984, 2568, 4147, 4943, 3002, 2986, 910, 2979, 2542, 2338, 2331, 2492, 1762, 4472, 1472, 1529, 2319, 4057, 4937, 2048, 4887, 1976, 4507, 1583, 338, 2078, 2372, 2102, 339, 911, 1711, 340, 912, 2013, 913, 2277, 914, 2403, 341, 915, 4902, 916, 342, 1594, 4440, 917, 343, 344, 4559, 918, 2233, 2439, 919, 345, 920, 346, 921, 922, 347, 2226, 348, 2180, 2298, 349, 350, 2099, 2036, 351, 4808, 923, 924, 4498, 1518, 3728, 3637, 3570, 3429, 4091, 2870, 2995, 4338, 3205, 2880, 3261, 1994, 3968, 4291, 4204, 4071, 4034, 1742, 2037, 352, 2820, 3912, 3287, 1218, 1190, 4145, 353, 2422, 354, 355, 925, 1782, 2184, 2261, 2490, 926, 927, 928, 4630, 2137, 3610, 356, 357, 4729, 358, 359, 4224, 1918, 1959, 1840, 3736, 2471, 1770, 929, 930, 931, 4155, 360, 361, 362, 932, 363, 364, 1279, 2289, 365, 1543, 366, 2156, 2472, 367, 4049, 1633, 1722, 368, 369, 1495, 1566, 370, 4967, 371, 372, 373, 1211, 1873, 2101, 2494, 1726, 374, 1442, 933, 1748, 4142, 1434, 1358, 1191, 3732, 4110, 4039, 4411, 4506, 4270, 4156, 3780, 4036, 4030, 4016, 1550, 3899, 1247, 1855, 1181, 3919, 1639, 3664, 1244, 4140, 3930, 4117, 4189, 4001, 3799, 3643, 3619, 1240, 1686, 1479, 1307, 1575, 4296, 1665, 3871, 4135, 1605, 4408, 3604, 1274, 4149, 1313, 3741, 1938, 3709, 1727, 3893, 1280, 3622, 1784, 3834, 1752, 1983, 1743, 3979, 4461, 4113, 3817, 4232, 1340, 1489, 4214, 3902, 1857, 2510, 2316, 1904, 1219, 1486, 1512, 1481, 1516, 3820, 3789, 4252, 4047, 4330, 4082, 4094, 1574, 1248, 4078, 1872, 1426, 3785, 3687, 4318, 4243, 3866, 3704, 4172, 1621, 4315, 1192, 1513, 1856, 2476, 3324, 2769, 2678, 1561, 3296, 375, 2343, 2348, 376, 377, 1395, 1584, 4093, 4453, 3940, 3778, 4374, 4210, 4009, 4264, 4339, 4368, 1738, 378, 1610, 4194, 4474, 4013, 4266, 1771, 1759, 1922, 3860, 3832, 1349, 1381, 3663, 1642, 1185, 4356, 3932, 1233, 4212, 3858, 1198, 4192, 3611, 1919, 1819, 3790, 3712, 1969, 4095, 1887, 4468, 1720, 4247, 934, 1790, 2002, 1657, 1663, 1336, 3894, 1554, 1494, 1405, 3576, 4314, 3695, 1851, 1850, 4362, 1815, 3845, 4511, 3656, 3638, 1406, 1596, 4454, 1443, 1661, 935, 4504, 1359, 1734, 3650, 1910, 1305, 1648, 3831, 4435, 1208, 1988, 4451, 1993, 1986, 3849, 1718, 4068, 1835, 1425, 1428, 1282, 4380, 1658, 1452, 1687, 4024, 379, 4072, 3791, 4491, 4323, 4014, 1304, 1440, 1511, 1981, 1676, 1547, 4422, 1283, 3861, 1383, 3644, 3691, 4259, 1749, 1418, 1176, 4216, 1924, 1421, 1387, 3992, 4423, 4253, 1618, 1871, 1256, 3748, 4119, 1297, 1586, 1251, 1299, 1954, 4450, 3990, 4029, 4097, 3890, 3796, 1389, 3711, 4344, 1578, 1476, 4343, 1202, 4413, 4384, 3808, 1647, 1475, 3892, 3674, 1739, 3926, 3595, 1943, 3756, 4405, 3973, 4109, 4159, 3744, 4387, 1960, 4275, 3781, 1535, 1210, 4492, 4365, 4118, 3655, 3886, 4278, 4383, 4485, 1392, 3751, 3931, 3986, 3678, 1249, 4353, 4208, 3710, 4238, 4213, 3969, 4436, 3175, 4128, 2970, 1228, 3534, 3437, 3406, 3641, 3639, 3954, 4335, 3995, 3582, 4475, 3784, 4470, 4010, 3802, 3941, 4427, 4396, 4348, 3587, 3818, 3864, 3956, 3863, 3731, 3814, 4067, 4354, 4350, 4334, 3821, 1932, 3929, 4171, 1258, 3824, 3631, 4465, 4494, 1320, 1398, 3828, 1204, 1223, 1284, 1685, 3773, 4209, 3014, 4462, 4246, 4190, 4312, 4023, 3760, 1178, 3884, 2783, 4038, 3545, 2916, 3112, 2834, 3880, 3673, 4102, 4399, 4048, 3752, 4207, 1235, 3943, 4355, 4087, 4100, 4327, 4037, 4163, 3918, 4486, 1243, 3933, 4178, 1662, 1643, 4152, 3634, 3617, 4445, 4303, 1370, 3838, 4199, 4284, 1213, 4382, 1399, 1187, 3714, 1828, 4487, 3615, 1842, 1501, 3746, 4018, 4420, 3606, 4121, 3724, 3935, 1941, 4419, 4282, 1955, 1949, 4310, 4488, 1577, 4127, 1288, 1171, 3670, 4052, 3627, 3777, 936, 1371, 3685, 1325, 1940, 380, 4482, 4258, 3812, 1581, 1860, 4124, 4508, 4500, 3652, 3972, 1309, 1630, 1528, 3717, 1217, 3692, 4430, 3764, 4316, 4285, 3645, 3971, 4421, 1172, 4026, 2740, 3125, 3546, 1206, 3842, 4404, 3690, 3962, 4513, 4340, 4329, 4410, 3703, 4136, 1763, 1487, 3589, 3907, 4153, 2707, 3730, 4426, 4180, 4041, 3923, 4444, 3851, 4429, 4361, 1441, 4394, 4302, 3758, 4510, 3742, 1868, 4077, 1710, 1939, 1335, 1666, 1407, 4187, 1193, 1188, 1196, 1724, 1717, 1200, 1646, 1997, 1975, 1701, 4280, 1613, 4006, 1984, 1351, 3653, 3833, 1593, 2561, 4442, 3900, 4298, 1761, 4388, 1820, 1597, 4317, 4249, 1341, 1203, 1680, 4441, 3628, 3725, 1945, 937, 4206, 1588, 1439, 3794, 4447, 1838, 3776, 3658, 4064, 1377, 4011, 4272, 4503, 1324, 1367, 3594, 3680, 1300, 1750, 938, 3913, 3774, 1877, 1987, 1862, 3998, 1380, 4185, 3686, 3696, 4463, 1350, 4008, 4230, 3853, 4244, 4083, 381, 1909, 3897, 1546, 382, 3613, 3273, 3452, 3525, 1229, 4105, 3835, 383, 1263, 1234, 3970, 1492, 3856, 3586, 1175, 4321, 4020, 4144, 1224, 1199, 3667, 2778, 4412, 4407, 1812, 1810, 3823, 1416, 1427, 1507, 1878, 4333, 3146, 4281, 4211, 1179, 3843, 1669, 1677, 1524, 1525, 1974, 384, 1979, 1456, 1239, 4167, 3740, 1876, 1388, 1967, 1474, 385, 1342, 1471, 4176, 1232, 1989, 4125, 1741, 1508, 1580, 4060, 4378, 1576, 1212, 1893, 3921, 3585, 1174, 1396, 4061, 4015, 1207, 3698, 3825, 3922, 4021, 4181, 1598, 1916, 1429, 4502, 4231, 1321, 4390, 3693, 3734, 1382, 3684, 1747, 3806, 3896, 3635, 1768, 4025, 3976, 3840, 3963, 4286, 1502, 3836, 4161, 3659, 3743, 4130, 3605, 1385, 1783, 4392, 4328, 1316, 4173, 4265, 1246, 1985, 1629, 1829, 1737, 3826, 1473, 1992, 1883, 1656, 1837, 1914, 1839, 1834, 3984, 4495, 3910, 4160, 3671, 4184, 4132, 4250, 1503, 1237, 1523, 1417, 4063, 1562, 3977, 1971, 1707, 1847, 1792, 3769, 4074, 1534, 4239, 4003, 3915, 1689, 1776, 1599, 1265, 1410, 1823, 1498, 1329, 939, 386, 940, 387, 1655, 3874, 4261, 3626, 1791, 3579, 1644, 3936, 4054, 4260, 4359, 4131, 4297, 4357, 4022, 3770, 4046, 1222, 1996, 3788, 4169, 1925, 3953, 4228, 4226, 4277, 4101, 1889, 1369, 3797, 4088, 4019, 3771, 3632, 1402, 388, 1520, 1767, 1466, 1194, 4137, 1908, 1927, 1758, 3772, 3661, 4186, 4174, 1170, 3850, 1315, 1611, 1530, 1859, 2209, 4183, 1408, 1403, 941, 4033, 3623, 3596, 1461, 1848, 1173, 1928, 1459, 1765, 1826, 3719, 1931, 3584, 4004, 3591, 3967, 4168, 3957, 3878, 4165, 4191, 3980, 4058, 4200, 4336, 3958, 1260, 4051, 3798, 4032, 1774, 4322, 3991, 4106, 1641, 1570, 3978, 3965, 4464, 3813, 4154, 1365, 4257, 3846, 4345, 4379, 3603, 1693, 3937, 3801, 1787, 1214, 4483, 4201, 1898, 1845, 1226, 1220, 4245, 1347, 3867, 1900, 3640, 3916, 4089, 1209, 3745, 3988, 3975, 4236, 4075, 4146, 4256, 4308, 4000, 4148, 3588, 3868, 4403, 3883, 4326, 4393, 3895, 4237, 3955, 3727, 4005, 4092, 4372, 4283, 1553, 3805, 4151, 1281, 1681, 4489, 3982, 4437, 3597, 4342, 3872, 3987, 4490, 3876, 3668, 4300, 1679, 1242, 3598, 3583, 3647, 389, 4304, 3793, 3779, 1937, 1907, 4042, 3648, 3996, 3800, 4367, 4099, 1807, 3887, 4428, 1625, 1390, 1884, 1682, 4364, 4306, 3869, 1278, 1672, 942, 1505, 1542, 1709, 1915, 3600, 3914, 1968, 3948, 1670, 3811, 1865, 1362, 943, 1716, 3961, 1506, 4221, 1376, 944, 1683, 4276, 1445, 1721, 1632, 3607, 1328, 1455, 1913, 1497, 1317, 1951, 1778, 1379, 3768, 4225, 1668, 2383, 945, 390, 391, 4406, 4341, 1480, 392, 393, 394, 395, 1714, 1422, 396, 2043, 946, 2265, 397, 3618, 4433, 1177, 3898, 398, 2251, 947, 948, 2212, 949, 950, 399, 951, 400, 1965, 4640, 2129, 2345, 4471, 952, 953, 401, 2475, 403, 404, 4758, 954, 955, 2437, 4139, 1482, 3602, 4434, 3721, 1592, 1825, 1698, 1519, 1352, 4202, 4409, 1977, 1917, 405, 406, 407, 408, 956, 2272, 957, 2267, 1631, 1684, 409, 2054, 3889, 958, 410, 2117, 411, 959, 412, 960, 2443, 4712, 4619, 2285, 413, 414, 415, 961, 2352, 2417, 962, 1905, 416, 963, 417, 418, 2382, 3675, 1833, 3974, 419, 964, 420, 421, 965, 966, 967, 968, 2365, 969, 970, 422, 1897, 2056, 2309, 4733, 1272, 4754, 2207, 971, 423, 4133, 3830, 4865, 972, 424, 973, 425, 4955, 426, 974, 2109, 2380, 427, 1708, 4676, 428, 4141, 429, 430, 3749, 431, 1619, 975, 4044, 3590, 1944, 4126, 1923, 1706, 432, 976, 977, 978, 4867, 4400, 433, 434, 1606, 979, 435, 980, 2604, 2895, 981, 436, 3448, 4959, 4563, 2188, 437, 438, 2055, 1692, 982, 2388, 2433, 2243, 983, 2035, 2120, 4940, 439, 440, 441, 2474, 442, 4900, 2052, 4764, 3862, 4055, 4358, 984, 2435, 4589, 2276, 2401, 985, 1664, 443, 2073, 2405, 986, 4309, 4045, 3854, 3682, 2491, 444, 445, 1972, 2688, 4366, 3425, 3231, 3649, 2759, 2724, 3873, 3755, 1216, 3599, 3775, 2754, 2606, 3471, 3234, 2565, 2803, 2562, 2684, 3411, 3405, 2690, 1255, 3694, 446, 3985, 3535, 1306, 4084, 3282, 447, 1353, 2168, 1780, 987, 988, 989, 2126, 448, 449, 2107, 450, 2031, 990, 451, 452, 991, 1485, 2242, 453, 2286, 992, 1728, 993, 4703, 994, 995, 454, 1696, 996, 2039, 997, 998, 3116, 1869, 456, 4759, 2500, 4798, 2262, 4562, 457, 1386, 999, 458, 4768, 4982, 4778, 2040, 1000, 4981, 3879, 2698, 459, 460, 1001, 461, 1447, 462, 1002, 2042, 2339, 1003, 463, 464, 4425, 1645, 465, 1004, 466, 2328, 467, 468, 469, 1231, 1468, 470, 471, 2496, 472, 473, 1005, 474, 2108, 4725, 1006, 476, 1273, 1007, 1744, 1488, 1659, 477, 478, 4598, 1604, 4753, 2493, 479, 1008, 1009, 1010, 1011, 1012, 1013, 1014, 481, 4313, 482, 483, 1499, 484, 1015, 4761, 2091, 2386, 2513, 1016, 4073, 1777, 2172, 485, 2205, 4592, 4545, 4720, 486, 1458, 4274, 2122, 4905, 5003, 4599, 4796, 2152, 4539, 4528, 4904, 4842, 4986, 4639, 4846, 4623, 4650, 4595, 2195, 4681, 2142, 487, 2182, 4710, 1775, 2083, 4205, 1526, 4586, 4602, 4518, 1697, 1017, 2000, 4692, 2480, 2017, 488, 2335, 489, 4969, 1894, 1882, 1817, 1880, 490, 1018, 3917, 3616, 4311, 1800, 4473, 4085, 4401, 1310, 3783, 3765, 1538, 3870, 491, 1948, 3699, 1735, 3792, 4290, 2074, 492, 2202, 5001, 2136, 493, 2211, 4532, 494, 2421, 495, 4090, 2378, 2210, 2247, 2478, 2047, 496, 4620, 4978, 1019, 2012, 1803, 3642, 497, 1322, 4752, 1020, 498, 1021, 2235, 2302, 2488, 4665, 4540, 5006, 4699, 4608, 4781, 499, 2049, 2404, 4685, 500, 501, 1022, 502, 1333, 503, 1023, 4686, 4804, 504, 4727, 505, 506, 4805, 2065, 1890, 1024, 507, 508, 509, 2110, 1025, 510, 1026, 3608, 1732, 511, 2397, 1864, 1816, 1531, 512, 513, 2451, 3636, 4892, 514, 1699, 4593, 1027, 4987, 515, 2495, 4660, 1028, 516, 1029, 2409, 1366, 2112, 2178, 2124, 2376, 5011, 4572, 4957, 4789, 4543, 4664, 4678, 4746, 2489, 4922, 2145, 1030, 4832, 4950, 1261, 4027, 3478, 3763, 2959, 1293, 2462, 517, 3197, 1595, 3413, 2238, 2067, 1031, 2228, 1448, 518, 4698, 4616, 2057, 2305, 2133, 2061, 4526, 4617, 1032, 1033, 2429, 2311, 1675, 4785, 1797, 519, 4578, 2271, 4693, 4604, 2466, 2148, 2420, 520, 4854, 2381, 2315, 2284, 4813, 521, 1034, 522, 523, 1999, 3759, 1215, 4122, 1730, 524, 525, 526, 3966, 4573, 5008, 1035, 527, 4973, 2508, 528, 3911, 529, 3289, 1821, 530, 531, 2426, 1036, 532, 1874, 533, 534, 1037, 1038, 536, 1039, 537, 538, 539, 1040, 3767, 1929, 1041, 1042, 3683, 2100, 4853, 2300, 2165, 540, 2105, 541, 4906, 542, 1338, 2292, 2021, 1616, 1901, 1796, 1517, 4331, 4332, 4466, 2719, 3803, 4123, 4233, 1824, 3129, 3087, 3505, 4158, 4254, 1449, 2121, 1044, 3720, 4351, 4414, 1673, 3453, 3254, 2501, 1649, 543, 544, 545, 546, 1045, 547, 2084, 2225, 4240, 3580, 4680, 1046, 548, 2062, 549, 1047, 550, 2598, 551, 552, 553, 3819, 1259, 4062, 1048, 554, 2841, 1049, 1050, 3515, 1433, 1323, 4301, 555, 556, 1051, 557, 558, 1052, 1053, 3738, 1567, 559, 1054, 1270, 3857, 1055, 2151, 560, 2175, 2089, 4514, 2198, 2193, 1257, 1238, 3662, 561, 2186, 1057, 562, 1058, 563, 4872, 2097, 2436, 564, 1059, 565, 566, 1060, 1061, 2231, 4203, 1899, 3981, 1062, 1303, 4116, 567, 1063, 568, 569, 570, 2367, 1946, 3620, 1064, 1514, 4002, 3679, 3964, 3707, 3666, 1348, 4273, 1804, 4497, 571, 1401, 4438, 1895, 1264, 572, 1912, 573, 3939, 4170, 4056, 1271, 1065, 1521, 1221, 1066, 1451, 1654, 1067, 3934, 4080, 4352, 574, 1700, 3739, 1565, 1419, 1811, 3950, 1690, 1397, 3716, 1569, 1437, 1674, 4337, 1285, 4268, 1183, 3726, 3881, 4134, 4347, 4012, 3938, 4066, 4198, 4416, 4164, 3630, 4229, 4292, 4193, 4325, 4375, 4371, 4432, 4215, 1753, 3944, 1409, 4195, 1729, 4223, 1540, 4455, 1068, 1069, 4512, 1723, 1070, 3750, 3633, 4070, 4104, 4162, 4235, 1863, 4346, 1881, 1071, 1814, 1572, 2418, 575, 4443, 3761, 1346, 1587, 1072, 3592, 576, 1891, 4469, 2430, 1275, 577, 1950, 1963, 4129, 1073, 1296, 1360, 1551, 3733, 4111, 3993, 4108, 3949, 1287, 1713, 1556, 1736, 1995, 1435, 1424, 1705, 1861, 1197, 1254, 4120, 1545, 4417, 1469, 1292, 2185, 1785, 1236, 4293, 1827, 3839, 3983, 4395, 1957, 578, 3928, 4295, 3715, 3855, 3609, 1990, 4076, 4175, 3927, 1757, 1650, 4299, 1773, 2004, 1267, 1364, 579, 1462, 1879, 4007, 3729, 3665, 3722, 1691, 1712, 1074, 1624, 1751, 1394, 3924, 3952, 580, 581, 2003, 1343, 2203, 1559, 1250, 1555, 2304, 582, 2395, 4114, 1818, 1075, 583, 1076, 1077, 1704, 4448, 584, 4882, 1078, 1079, 1786, 585, 3354, 1832, 586, 3432, 2891, 587, 588, 4583, 2505, 1903, 2077, 4936, 4658, 4830, 2446, 1080, 2278, 1081, 1082, 4459, 1083, 589, 1563, 1084, 2255, 2113, 590, 591, 1085, 2256, 592, 2308, 593, 594, 595, 4931, 2407, 1858, 596, 597, 598, 1453, 2559, 2590, 2738, 4478, 4069, 1809, 1327, 4150, 3260, 3481, 3672, 3625, 2008, 4439, 3852, 3997, 1411, 599, 3847, 4993, 1268, 4050, 3377, 4424, 1496, 4143, 4493, 3492, 1962, 1412, 2455, 600, 2457, 2321, 1086, 601, 4017, 4477, 1794, 2483, 4776, 2291, 602, 4263, 3072, 2009, 2199, 1754, 1087, 1088, 3888, 603, 604, 4777, 2324, 605, 1368, 3827, 4103, 606, 607, 1089, 2220, 4549, 1090, 1571, 1091, 1438, 608, 1092, 609, 2320, 2069, 610, 611, 1093, 612, 1094, 3701, 4389, 613, 4897, 1603, 614, 1095, 2154, 5000, 615, 616, 2263, 1332, 1715, 4369, 1652, 1096, 617, 1541, 618, 1921, 1733, 1373, 1870, 619, 4218, 1798, 2387, 1097, 1098, 1099, 1100, 620, 1702, 621, 622, 4801, 4855, 4847, 2398, 2239, 1101, 1667, 1384, 623, 4745, 3700, 1788, 1600, 624, 2098, 625, 4550, 4721, 4960, 2473, 4792, 4675, 1102, 1423, 626, 2771, 627, 1339, 3875, 628, 629, 3070, 4565, 2118, 2015, 4818, 4860, 2557, 2795, 2906, 2103, 4869, 2029, 3299, 3118, 4932, 4838, 4901, 4908, 4996, 4779, 2377, 4657, 4646, 4875, 4627, 4515, 4876, 4965, 4605, 4576, 2028, 4985, 4799, 4850, 1103, 4757, 4747, 1614, 1947, 2237, 630, 631, 4997, 4618, 4479, 3766, 632, 1104, 1105, 4886, 1106, 2432, 4827, 633, 1107, 4530, 634, 2371, 4651, 1108, 4536, 635, 1813, 636, 2431, 4866, 4991, 4814, 4560, 4956, 637, 4555, 1109, 4577, 4633, 2213, 638, 639, 3706, 1110, 640, 1111, 641, 4581, 4893, 4831, 2481, 4644, 4734, 2190, 4881, 4837, 4888, 4648, 642, 4548, 4807, 4896, 4868, 2374, 1112, 4823, 2164, 1113, 3735, 3390, 1694, 3431, 2838, 3483, 3464, 3848, 2558, 3314, 3086, 3029, 2956, 3517, 2651, 2914, 2680, 2632, 3121, 3100, 3528, 3526, 3084, 4220, 3304, 2846, 1186, 3235, 2903, 3559, 2687, 3409, 3237, 2900, 2999, 3349, 3171, 2752, 3262, 3504, 3047, 4376, 3193, 3430, 2525, 2670, 2911, 3508, 2776, 2697, 3200, 2790, 3323, 2543, 2874, 2614, 3904, 3373, 3054, 2617, 4242, 3621, 2708, 4179, 4398, 3959, 4935, 1269, 3095, 1286, 3624, 4481, 1432, 3511, 2735, 4381, 3295, 1585, 2390, 1568, 1114, 1766, 3221, 2643, 2739, 643, 4735, 4760, 4629, 1115, 4918, 4688, 3920, 644, 4723, 4949, 4607, 4719, 1116, 645, 646, 4611, 2353, 4645, 4603, 4762, 4819, 2221, 4636, 4992, 2307, 647, 1801, 4279, 3762, 1637, 1509, 4843, 4797, 4590, 4516, 4541, 2200, 4580, 4858, 648, 649, 1117, 4780, 4800, 2477, 4724, 4551, 4674, 1118, 1119, 2965, 2369, 2695, 3293, 650, 651, 4862, 4722, 4944, 1120, 652, 1121, 4983, 4784, 4877, 653, 654, 1122, 3264, 655, 2076, 4849, 656, 657, 2447, 658, 659, 2191, 4035, 2910, 3391, 2808, 3099, 2913, 3676, 2852, 3284, 2731, 1609, 2375, 3537, 3994, 1319, 4467, 1802, 1227, 1623, 660, 4844, 2086, 4770, 4714, 4979, 4812, 2192, 1123, 661, 2364, 662, 663, 664, 1124, 1125, 665, 2487, 4899, 2138, 1126, 666, 667, 4569, 4554, 4917, 2322, 1127, 1128, 1129, 668, 669, 1130, 670, 1131, 1527, 1132, 671, 1772, 2314, 1133, 1134, 2470, 1135, 672, 2236, 4716, 673, 4600, 2196, 674, 2456, 4606, 4588, 4963, 4851, 4558, 4557, 4697, 4610, 4773, 4687, 4708, 4910, 2123, 1136, 1137, 2358, 5005, 2208, 4952, 4945, 1933, 1731, 1793, 675, 676, 3342, 1138, 1139, 677, 4840, 4597, 4870, 1140, 4990, 4954, 4916, 678, 1141, 4737, 4527, 2253, 4531, 679, 1142, 1143, 680, 4771, 1144, 4638, 681, 4705, 4525, 4898, 2325, 2415, 5004, 1145, 682, 683, 2141, 1146, 684, 685, 2445, 686, 687, 4861, 2157, 688, 3822, 689, 690, 4743, 691, 1147, 1601, 692, 1148, 693, 4537, 4825, 4625, 4621, 3905, 694, 695, 1414, 1149, 696, 2027, 2159, 4756, 4690, 4859, 4793, 4575, 2160, 4828, 4731, 4802, 4750, 1150, 2081, 2258, 697, 1795, 1372, 1695, 1866, 1151, 4115, 1719, 2280, 4662, 698, 2176, 2194, 2217, 1920, 699, 700, 701, 4999, 1544, 4739, 2512, 702, 703, 4031, 4305, 1636, 1393, 2010, 3810, 4452, 3677, 4227, 1277, 1400, 4402, 4157, 4197, 1337, 1253, 1532, 4028, 3989, 2449, 4715, 704, 2050, 1493, 1854, 1902, 1510, 1152, 4824, 705, 2340, 4182, 706, 4652, 2442, 2484, 707, 708, 709, 4667, 1153, 2412, 4732, 4476, 2053, 710, 1375, 711, 712, 713, 4738, 4811, 4570, 4961, 1245, 714, 2045, 4707, 715, 2169, 4713, 4879, 1841, 4234, 4924, 1154, 1314, 4096, 2023, 716, 717, 4895, 2414, 718, 1155, 719, 720, 2063, 1311, 4921, 721, 4642, 722, 4833, 4903, 4885, 4666, 2249, 4217, 1156, 723, 1157, 1627, 2116, 2287, 1158, 2330, 4826, 4622, 4740, 724, 4700, 725, 1159, 5013, 4894, 726, 2434, 1953, 1160, 1201, 727, 3787, 2046, 1161, 728, 729, 2485, 2044, 4568, 3747, 2248, 730, 731, 2024, 1846, 2507, 2368, 1162, 2019, 2333, 3815, 2005, 2266, 1964, 2347, 2385, 732, 2177, 2059, 4958, 4927, 1822, 4815, 1262, 2094, 4480, 1537, 1291, 2419, 1318, 2283, 4976, 4628, 4294, 4926, 1582, 2162, 733, 4587, 734, 735, 3439, 2833, 4287, 4509, 4505, 4267, 3697, 3272, 4112, 2967, 3651, 1991, 1805, 1628, 3705, 2479, 736, 1195, 4863, 1163, 3859, 1164, 2394, 1165, 2355, 2351, 4835, 2259, 4571, 2275, 1166, 4968, 2250, 2423, 737, 1167, 4989, 4669, 4552, 4612, 2127, 1745, 1973, 4767, 1168, 2273, 2310, 3807, 4307, 1169, 2303, 1454, or 1781.

[0219] A VP capsid polypeptide may have a 581 to 589 region having a sequence of SEQ ID NO: 5014, wherein X³ of SEQ ID NO: 5014 is not D and X⁶ of SEQ ID NO: 5014 is not D. In some embodiments, the 581 to 589 region has a sequence of any one of SEQ ID NOs: 738, 739, 4177, 1289, 740, 14, 15, 741, 742, 743, 16, 744, 17, 18, 745, 3477, 1548, 3051, 2982, 2171, 2877, 746, 19, 20, 3036, 3426, 3073, 3169, 747, 2406, 3362, 2784, 2469, 4889, 21, 3192, 4942, 22, 23, 1638, 748, 24, 25, 749, 26, 27, 1703, 1836, 28, 2038, 2301, 3660, 29, 750, 30, 31, 2095, 1640, 33, 34, 35, 36, 37, 4742, 2450, 38, 4925, 39, 751, 752, 1653, 1205, 3795, 753, 4288, 4219, 2770, 2962, 4241, 4107, 2718, 3317, 4391, 4053, 3263, 2553, 3947, 2710, 2608, 3467, 2796, 2961, 2529, 3320, 2674, 2635, 3446, 3053, 3250, 3688, 1182, 1998, 4320, 3351, 2655, 3514, 2779, 3194, 3319, 3224, 3281, 3708, 2807, 3562, 3274, 3374, 3013, 3416, 2981, 3065, 2777, 3469, 2977, 2638, 2972, 3059, 2574, 3380, 4262, 3167, 3368, 2781, 3547, 3386, 1225, 2960, 3485, 3370, 3443, 2824, 754, 1467, 3327, 3178, 3006, 3252, 2991, 3470, 2888, 2572, 3418, 2642, 2519, 3363, 40, 2633, 41, 42, 43, 755, 2511, 44, 45, 756, 46, 757, 47, 48, 1952, 758, 2341, 2410, 49, 3122, 2551, 3718, 4806, 2216, 3484, 3577, 759, 2072, 2034, 50, 1308, 1230, 3960, 1378, 2994, 3080, 2589, 3681, 51, 2167, 52, 760, 53, 2389, 4755, 761, 4591, 762, 4659, 54, 2146, 3925, 55, 3654, 2087, 2346, 4766, 4682, 4984, 4744, 56, 763, 764, 4626, 4702, 57, 58, 59, 60, 61, 4086, 1740, 1660, 765, 766, 62, 1966, 2032, 2499, 2332, 767, 63, 2096, 2181, 4913, 2438, 2041, 64, 768, 769, 770, 2384, 2402, 771, 65, 66, 67, 772, 2458, 2197, 68, 3816, 69, 2599, 2706, 2497, 70, 2399, 71, 4769, 2366, 72, 73, 74, 3865, 1549, 1361, 2453, 3882, 773, 3713, 1942, 2140, 75, 1312, 4501, 76, 77, 774, 1413, 775, 776, 78, 1560, 4289, 3757, 79, 3593, 4043, 1806, 3908, 4397, 1615, 4415, 3723, 2006, 3754, 1470, 4360, 80, 3945, 2854, 3523, 3669, 1356, 777, 81, 82, 4065, 83, 84, 2030, 1294, 2413, 2064, 1484, 2299, 85, 4594, 86, 778, 87, 3891, 4456, 4040, 4496, 1982, 2001, 1478, 1189, 88, 1490, 1885, 1926, 89, 90, 91, 779, 2270, 780, 2161, 1180, 92, 781, 782, 783, 2356, 784, 785, 786, 94, 95, 788, 1831, 1867, 96, 4458, 97, 1970, 4656, 2173, 1936, 2349, 1590, 98, 99, 100, 789, 790, 1298, 101, 1688, 791, 792, 2007, 4556, 2070, 102, 793, 4632, 103, 794, 795, 104, 105, 106, 2229, 796, 4691, 107, 2440, 1849, 108, 797, 4736, 2509, 2018, 2227, 4787, 1579, 110, 1906, 111, 2428, 798, 2075, 112, 2411, 113, 2359, 799, 4848, 800, 2461, 1444, 2313, 2350, 4579, 4821, 801, 114, 2329, 4864, 4834, 115, 1344, 116, 802, 117, 118, 119, 4929, 4677, 120, 4791, 2158, 121, 803, 804, 1463, 805, 122, 2139, 2290, 1760, 2465, 123, 2424, 2058, 2230, 124, 4717, 806, 125, 126, 2370, 127, 4521, 128, 4971, 4994, 807, 4533, 129, 130, 131, 132, 4933, 808, 2336, 2026, 2204, 809, 810, 2281, 133, 1978, 134, 811, 812, 135, 136, 137, 138, 813, 814, 139, 4673, 140, 815, 1326, 141, 142, 143, 2344, 5009, 144, 145, 816, 4654, 2125, 4663, 4810, 4816, 1634, 1302, 817, 146, 818, 147, 148, 149, 4546, 150, 151, 152, 153, 154, 155, 819, 820, 156, 2149, 157, 2295, 821, 158, 160, 161, 4631, 2441, 162, 163, 164, 165, 166, 822, 167, 168, 169, 170, 171, 823, 172, 4613, 824, 1651, 173, 1483, 174, 175, 825, 176, 177, 178, 179, 4624, 4809, 4520, 180, 826, 827, 181, 828, 4695, 2130, 4911, 182, 4582, 4873, 2189, 183, 4641, 829, 184, 185, 2244, 4647, 186, 187, 188, 189, 190, 830, 191, 192, 193, 194, 2071, 4615, 2361, 195, 4852, 4914, 4947, 196, 1391, 197, 4534, 4726, 198, 199, 831, 2240, 2223, 200, 201, 202, 203, 2106, 2503, 4775, 204, 205, 832, 833, 206, 834, 2232, 2294, 207, 2166, 208, 209, 210, 835, 836, 1334, 837, 3901, 3312, 2649, 1301, 211, 212, 1450, 4386, 3028, 213, 1446, 214, 2206, 215, 1896, 1522, 3490, 838, 216, 2090, 2241, 217, 218, 4653, 219, 1612, 220, 221, 222, 839, 223, 4974, 4790, 4915, 2464, 4567, 4774, 4964, 2360, 840, 224, 4928, 4741, 225, 2088, 4751, 226, 227, 4890, 4519, 4883, 228, 4786, 229, 230, 231, 2448, 841, 842, 232, 233, 4782, 234, 2269, 843, 235, 844, 236, 237, 4930, 845, 846, 238, 847, 239, 848, 849, 2150, 850, 851, 852, 853, 1536, 240, 854, 241, 242, 243, 244, 245, 246, 247, 248, 4696, 855, 4634, 856, 249, 250, 251, 252, 253, 254, 255, 857, 2115, 2218, 256, 257, 258, 259, 858, 859, 260, 261, 860, 861, 862, 262, 4966, 863, 864, 263, 4749, 4970, 2296, 2318, 4535, 865, 2326, 264, 1241, 265, 266, 866, 1477, 267, 867, 268, 868, 269, 4668, 270, 869, 870, 271, 871, 872, 272, 4822, 4709, 873, 4655, 4972, 2317, 874, 1252, 273, 1591, 4975, 875, 274, 2025, 275, 1980, 276, 876, 877, 2066, 277, 278, 279, 4670, 280, 2323, 2288, 2334, 4939, 4689, 281, 878, 2416, 1892, 879, 1539, 2214, 2215, 880, 2327, 881, 882, 4601, 1295, 3601, 3877, 1930, 1420, 1678, 1460, 2306, 884, 282, 1799, 283, 284, 4988, 4871, 4553, 4772, 2260, 1626, 885, 286, 1374, 886, 2119, 2504, 2468, 287, 1620, 1290, 2425, 2482, 4564, 4671, 2282, 288, 1354, 2033, 289, 887, 290, 888, 291, 1956, 2362, 2467, 889, 2357, 4547, 4765, 292, 4794, 2391, 4324, 293, 890, 294, 295, 4138, 891, 2297, 2254, 296, 2224, 3903, 297, 892, 3829, 298, 299, 3809, 4271, 3844, 1436, 300, 1515, 1617, 301, 1961, 4649, 5010, 302, 2060, 303, 304, 305, 2452, 2147, 4574, 4538, 306, 2293, 1589, 893, 4946, 4370, 4841, 2342, 307, 308, 309, 894, 2246, 2155, 3646, 4059, 1431, 1331, 311, 4948, 312, 895, 1779, 313, 314, 315, 316, 896, 1558, 1552, 317, 2312, 318, 319, 897, 320, 898, 321, 322, 899, 1958, 2022, 2016, 900, 2454, 323, 2427, 2134, 324, 901, 325, 902, 326, 2373, 4803, 2459, 1491, 327, 328, 903, 2463, 2264, 329, 330, 1635, 4820, 905, 331, 4706, 4484, 1756, 906, 907, 4661, 2179, 4584, 4609, 332, 4907, 4635, 4529, 4683, 4561, 333, 3536, 2701, 2799, 3332, 3294, 3159, 3069, 2637, 3025, 2782, 3247, 3350, 2692, 2586, 3004, 3049, 2694, 2650, 3554, 2983, 3403, 3214, 3163, 2541, 3090, 3097, 3462, 1430, 2941, 3486, 2842, 3558, 3104, 3037, 3419, 2780, 2931, 1276, 2928, 2609, 3068, 3128, 2548, 2538, 2618, 2789, 3228, 2657, 3189, 2128, 2863, 3307, 3300, 2546, 3048, 3543, 2946, 2975, 3346, 3067, 2728, 2955, 3408, 3027, 3094, 3203, 2988, 2751, 2953, 2566, 2578, 2823, 3063, 3335, 3000, 3181, 3011, 3138, 3389, 2805, 3074, 2894, 3149, 2560, 3417, 3265, 3378, 2901, 2837, 2822, 2745, 3473, 3530, 3040, 2597, 3509, 3522, 3161, 2926, 3209, 3105, 3400, 2630, 2905, 2671, 2818, 2806, 2702, 2709, 2400, 3549, 3538, 2534, 2773, 2623, 3491, 3243, 3136, 2693, 3164, 3343, 2918, 2555, 2794, 2679, 3510, 3110, 2672, 3442, 2929, 3184, 3488, 2135, 4763, 3414, 3093, 2996, 3141, 3544, 3102, 2856, 2957, 3466, 3461, 2788, 2660, 3344, 3204, 2720, 3379, 2826, 1789, 2396, 2785, 3249, 3527, 4460, 3352, 2051, 2569, 4457, 2011, 4857, 2163, 4319, 3906, 1533, 1755, 1888, 4248, 1557, 3804, 1363, 1934, 1602, 1404, 4188, 1330, 4349, 3337, 3533, 2629, 3038, 2539, 3567, 3291, 3348, 3115, 3359, 2993, 3079, 3506, 2527, 2963, 2938, 2516, 3113, 1345, 2639, 3143, 3044, 2747, 3154, 3280, 3039, 2743, 2902, 3056, 2554, 2522, 3103, 3210, 3434, 2656, 4251, 4166, 4196, 3206, 3328, 2588, 3553, 2714, 3078, 3222, 3137, 3357, 2717, 2944, 3012, 3220, 3202, 2811, 3083, 3269, 3566, 2699, 2515, 3023, 2533, 3288, 3075, 3005, 2685, 3058, 2976, 2622, 3333, 3463, 2939, 3521, 3268, 3117, 2626, 2616, 3240, 2570, 3565, 2919, 3157, 2849, 3444, 2631, 3420, 2659, 3325, 3186, 2920, 3258, 3440, 3457, 3310, 2761, 3134, 2621, 3531, 2711, 2774, 2867, 2585, 3155, 2620, 3156, 2844, 3126, 3160, 2909, 3542, 3225, 2887, 3474, 3218, 2744, 2896, 3135, 3424, 3498, 3529, 2661, 2667, 2549, 2819, 2768, 2935, 3182, 2772, 3230, 3043, 2922, 3581, 3524, 2869, 2610, 3298, 2775, 3108, 2603, 3614, 2612, 2860, 3187, 3238, 3786, 4385, 3016, 3436, 2876, 2987, 3532, 3438, 3561, 3259, 2663, 2890, 3433, 3071, 3018, 2580, 2755, 3015, 2540, 3398, 2664, 2583, 2830, 2644, 2641, 3513, 2725, 2723, 3338, 3556, 2866, 2514, 2932, 2753, 2862, 2899, 2605, 2989, 3096, 3124, 2985, 2716, 3145, 3017, 2591, 2640, 3033, 1853, 3216, 3316, 3412, 2971, 3256, 3153, 3575, 3339, 2915, 2531, 3552, 3475, 3060, 3375, 2756, 3382, 2847, 2859, 3251, 3702, 3423, 2537, 2801, 3076, 2696, 3092, 3459, 3144, 3441, 2802, 3479, 2907, 3512, 3518, 3021, 2871, 3032, 2647, 2945, 3045, 2763, 3313, 3034, 3315, 3541, 2746, 2669, 2524, 3003, 2732, 3166, 3046, 3306, 2873, 3364, 3253, 3215, 3061, 2804, 2722, 2964, 2990, 2836, 4098, 4449, 3173, 2762, 3737, 2628, 3507, 2564, 3031, 2872, 3360, 2658, 2930, 2904, 3244, 3217, 3311, 3445, 2840, 3372, 2958, 3098, 3356, 3456, 3388, 2624, 3207, 2576, 2742, 2665, 2815, 3052, 3421, 2593, 3242, 2535, 2966, 2898, 2858, 2943, 2668, 2798, 3196, 2528, 2713, 3001, 2691, 2948, 2767, 2544, 3302, 2734, 2893, 2592, 2861, 3502, 2969, 2582, 3229, 2676, 2545, 3255, 3330, 2547, 3257, 2882, 3151, 3088, 2883, 3318, 2645, 2733, 2587, 3500, 3008, 2715, 2845, 3183, 2654, 3233, 3267, 2741, 2827, 2704, 3091, 2832, 2736, 3177, 3271, 2835, 2908, 3176, 2947, 3292, 3191, 2517, 3026, 3082, 3392, 3381, 2584, 2712, 3213, 3451, 2634, 3150, 2810, 3303, 2573, 3460, 2615, 3394, 2828, 3329, 4377, 4499, 3555, 2974, 3782, 3629, 3578, 3885, 2817, 3248, 2954, 3334, 3571, 3345, 3551, 3384, 3422, 1357, 1844, 2530, 2973, 4418, 4081, 3951, 1764, 1671, 1852, 334, 1843, 3449, 3185, 3399, 2786, 3055, 3472, 3397, 2601, 3564, 3277, 4373, 3548, 3179, 3407, 3841, 3347, 3142, 4255, 4431, 3241, 3077, 2700, 3147, 2648, 3283, 2829, 3278, 2581, 2536, 4363, 2848, 3410, 2797, 2523, 2520, 2721, 3496, 2571, 3198, 3219, 3030, 2673, 2921, 3837, 3301, 3322, 2705, 3239, 2949, 3369, 3396, 2892, 2897, 2766, 3174, 3297, 2550, 2889, 2933, 2793, 2627, 2677, 3119, 2596, 3226, 3172, 3089, 2868, 2839, 3942, 3120, 3286, 2843, 3465, 1564, 3946, 4222, 1504, 3999, 2682, 1875, 2865, 3539, 3168, 2864, 3308, 3557, 2940, 3109, 3503, 2625, 3455, 3114, 2595, 3331, 2978, 2518, 2521, 4079, 3024, 3573, 2952, 2653, 1769, 3180, 2813, 2652, 2600, 2816, 3201, 3188, 3270, 2997, 2992, 3009, 3520, 2936, 3275, 3165, 3447, 3131, 3305, 2809, 2792, 2729, 2814, 2619, 3266, 2825, 3066, 2857, 2998, 3064, 2681, 3035, 3279, 2764, 3480, 3127, 2912, 3010, 2607, 3211, 3111, 3041, 1573, 3909, 4269, 3487, 3489, 3019, 335, 1266, 1415, 2980, 3428, 3435, 3482, 3020, 2748, 2646, 2787, 2760, 2563, 3085, 3133, 3158, 3170, 2703, 3494, 2556, 2552, 3395, 3245, 3404, 2675, 2791, 2252, 4845, 1911, 4856, 2363, 908, 1935, 4711, 4728, 2460, 2749, 3341, 3355, 2575, 2942, 2886, 2758, 2594, 3495, 2884, 3516, 3042, 2737, 2923, 3563, 2855, 3476, 2611, 2937, 3383, 3497, 3402, 3162, 2662, 2875, 3223, 2878, 2079, 1808, 3285, 2757, 3057, 2951, 3519, 2579, 2853, 3387, 3401, 3493, 3393, 1608, 3365, 2885, 3574, 3081, 3007, 3568, 3152, 3367, 3358, 336, 2268, 3468, 3290, 3550, 3132, 2726, 2879, 3190, 3309, 2613, 2765, 3106, 1355, 3454, 2851, 2881, 3232, 3458, 3326, 3353, 2927, 3212, 2950, 3376, 3208, 3062, 3612, 3195, 3385, 2686, 2602, 3569, 3123, 2727, 1622, 2821, 2636, 2750, 2850, 3050, 2925, 3336, 3540, 2689, 3139, 2526, 3361, 3022, 3427, 3107, 3140, 3371, 3276, 2831, 3501, 2924, 3366, 3199, 3101, 3321, 3499, 2917, 2683, 2800, 2812, 3340, 3227, 3148, 3657, 4446, 1746, 1464, 1886, 2666, 3246, 3130, 3560, 3236, 2730, 3572, 1607, 3689, 2968, 1457, 1500, 337, 1184, 3450, 2577, 2567, 2532, 3415, 2934, 2984, 2568, 4147, 4943, 3002, 2986, 910, 2979, 2542, 2338, 2331, 2492, 1762, 4472, 1472, 1529, 2319, 4057, 4937, 2048, 4887, 1976, 4507, 1583, 338, 2078, 2372, 2102, 339, 911, 1711, 340, 912, 2013, 913, 2277, 914, 2403, 341, 915, 4902, 916, 342, 1594, 4440, 917, 343, 344, 4559, 918, 2439, 919, 345, 920, 346, 921, 922, 347, 2226, 348, 2180, 2298, 349, 350, 2099, 2036, 351, 4808, 923, 924, 4498, 1518, 3728, 3637, 3570, 3429, 4091, 2870, 2995, 4338, 3205, 2880, 3261, 1994, 3968, 4291, 4204, 4071, 4034, 1742, 2037, 352, 2820, 3912, 3287, 1218, 1190, 4145, 353, 2422, 354, 355, 925, 1782, 2184, 2261, 2490, 926, 927, 928, 4630, 2137, 3610, 356, 357, 4729, 358, 359, 4224, 1918, 1959, 1840, 3736, 1770, 929, 930, 931, 4155, 360, 361, 362, 932, 363, 364, 1279, 2289, 365, 1543, 366, 2156, 2472, 367, 4049, 1633, 1722, 368, 369, 1495, 1566, 370, 4967, 371, 372, 373, 1211, 1873, 2101, 2494, 1726, 374, 1442, 933, 1748, 4142, 1434, 1358, 1191, 3732, 4110, 4039, 4411, 4506, 4270, 4156, 3780, 4036, 4030, 4016, 1550, 3899, 1247, 1855, 1181, 3919, 1639, 3664, 1244, 4140, 3930, 4117, 4189, 4001, 3799, 3643, 3619, 1240, 1686, 1479, 1307, 1575, 4296, 1665, 3871, 4135, 1605, 4408, 3604, 1274, 4149, 1313, 3741, 1938, 3709, 1727, 3893, 1280, 3622, 1784, 3834, 1752, 1983, 1743, 3979, 4461, 4113, 3817, 4232, 1340, 1489, 4214, 3902, 1857, 2510, 2316, 1904, 1219, 1486, 1512, 1481, 1516, 3820, 3789, 4252, 4047, 4330, 4082, 4094, 1574, 1248, 4078, 1872, 1426, 3785, 3687, 4318, 4243, 3866, 3704, 4172, 1621, 4315, 1192, 1513, 1856, 2476, 3324, 2769, 2678, 1561, 3296, 375, 2348, 376, 377, 1395, 1584, 4093, 4453, 3940, 3778, 4374, 4210, 4009, 4264, 4339, 4368, 1738, 378, 1610, 4194, 4474, 4013, 4266, 1771, 1759, 1922, 3860, 3832, 1349, 1381, 3663, 1642, 1185, 4356, 3932, 1233, 4212, 3858, 1198, 4192, 3611, 1919, 1819, 3790, 3712, 1969, 4095, 1887, 4468, 1720, 4247, 934, 1790, 2002, 1657, 1663, 1336, 3894, 1554, 1494, 1405, 3576, 4314, 3695, 1851, 1850, 4362, 1815, 3845, 4511, 3656, 3638, 1406, 1596, 4454, 1443, 1661, 935, 4504, 1359, 1734, 3650, 1910, 1305, 1648, 3831, 4435, 1208, 1988, 4451, 1993, 1986, 3849, 1718, 4068, 1835, 1425, 1428, 1282, 4380, 1658, 1452, 1687, 4024, 379, 4072, 3791, 4491, 4323, 4014, 1304, 1440, 1511, 1981, 1676, 1547, 4422, 1283, 3861, 1383, 3644, 3691, 4259, 1749, 1418, 1176, 4216, 1387, 3992, 4423, 4253, 1618, 1871, 1256, 3748, 4119, 1297, 1586, 1251, 1299, 1954, 4450, 3990, 4029, 4097, 3890, 3796, 1389, 3711, 4344, 1578, 1476, 4343, 1202, 4413, 4384, 3808, 1647, 1475, 3892, 3674, 1739, 3926, 3595, 1943, 3756, 4405, 3973, 4109, 4159, 3744, 4387, 1960, 4275, 3781, 1535, 1210, 4492, 4365, 4118, 3655, 3886, 4278, 4383, 4485, 1392, 3751, 3931, 3986, 3678, 1249, 4353, 4208, 3710, 4238, 4213, 3969, 4436, 3175, 4128, 2970, 1228, 3534, 3437, 3406, 3641, 3639, 3954, 4335, 3995, 3582, 4475, 3784, 4470, 4010, 3802, 3941, 4427, 4396, 4348, 3587, 3818, 3864, 3956, 3863, 3731, 3814, 4067, 4354, 4350, 4334, 3821, 1932, 3929, 4171, 1258, 3824, 3631, 4465, 4494, 1320, 1398, 3828, 1204, 1223, 1284, 1685, 3773, 4209, 3014, 4462, 4246, 4190, 4312, 4023, 3760, 1178, 3884, 2783, 4038, 3545, 2916, 3112, 2834, 3880, 3673, 4102, 4399, 4048, 3752, 4207, 1235, 3943, 4355, 4087, 4100, 4327, 4037, 4163, 3918, 4486, 1243, 3933, 4178, 1662, 1643, 4152, 3634, 3617, 4445, 4303, 1370, 3838, 4199, 4284, 1213, 4382, 1399, 1187, 3714, 1828, 4487, 3615, 1842, 1501, 3746, 4018, 4420, 3606, 4121, 3724, 3935, 1941, 4419, 4282, 1955, 1949, 4310, 4488, 1577, 4127, 1288, 1171, 3670, 4052, 3627, 3777, 936, 1371, 3685, 1325, 1940, 380, 4482, 4258, 3812, 1581, 1860, 4124, 4508, 4500, 3652, 3972, 1309, 1630, 1528, 3717, 1217, 3692, 4430, 3764, 4316, 4285, 3645, 3971, 4421, 1172, 4026, 2740, 3125, 3546, 1206, 3842, 4404, 3690, 3962, 4513, 4340, 4329, 4410, 3703, 4136, 1763, 1487, 3589, 3907, 4153, 2707, 3730, 4426, 4180, 4041, 3923, 4444, 3851, 4429, 4361, 1441, 4394, 4302, 3758, 4510, 3742, 1868, 4077, 1710, 1939, 1335, 1666, 1407, 4187, 1193, 1188, 1196, 1724, 1717, 1200, 1646, 1997, 1975, 1701, 4280, 1613, 4006, 1984, 1351, 3653, 3833, 1593, 2561, 4442, 3900, 4298, 1761, 4388, 1820, 1597, 4317, 4249, 1341, 1203, 1680, 4441, 3628, 3725, 1945, 937, 4206, 1588, 1439, 3794, 4447, 1838, 3776, 3658, 4064, 1377, 4011, 4272, 4503, 1324, 1367, 3594, 3680, 1300, 1750, 938, 3913, 3774, 1877, 1987, 1862, 3998, 1380, 4185, 3686, 3696, 4463, 1350, 4008, 4230, 3853, 4244, 4083, 381, 1909, 3897, 1546, 382, 3613, 3273, 3452, 3525, 1229, 4105, 3835, 383, 1263, 1234, 3970, 1492, 3856, 3586, 1175, 4321, 4020, 4144, 1224, 1199, 3667, 2778, 4412, 4407, 1812, 1810, 3823, 1416, 1427, 1507, 1878, 4333, 3146, 4281, 4211, 1179, 3843, 1669, 1677, 1524, 1525, 1974, 384, 1979, 1456, 1239, 4167, 3740, 1876, 1388, 1967, 1474, 385, 1342, 1471, 4176, 1232, 1989, 4125, 1741, 1508, 1580, 4060, 4378, 1576, 1212, 1893, 3921, 3585, 1174, 1396, 4061, 4015, 1207, 3698, 3825, 3922, 4021, 4181, 1598, 1916, 1429, 4502, 4231, 1321, 4390, 3693, 3734, 1382, 3684, 1747, 3806, 3896, 3635, 1768, 4025, 3976, 3840, 3963, 4286, 1502, 3836, 4161, 3659, 3743, 4130, 3605, 1385, 1783, 4392, 4328, 1316, 4173, 4265, 1246, 1985, 1629, 1829, 1737, 3826, 1473, 1992, 1883, 1656, 1837, 1914, 1839, 1834, 3984, 4495, 3910, 4160, 3671, 4184, 4132, 4250, 1503, 1237, 1523, 1417, 4063, 1562, 3977, 1971, 1707, 1847, 1792, 3769, 4074, 1534, 4239, 4003, 3915, 1689, 1776, 1599, 1265, 1410, 1823, 1498, 1329, 939, 386, 387, 1655, 3874, 4261, 3626, 1791, 3579, 1644, 3936, 4054, 4260, 4359, 4131, 4297, 4357, 4022, 3770, 4046, 1222, 1996, 3788, 4169, 1925, 3953, 4228, 4226, 4277, 4101, 1889, 1369, 3797, 4088, 4019, 3771, 3632, 1402, 388, 1520, 1767, 1466, 1194, 4137, 1908, 1927, 1758, 3772, 3661, 4186, 4174, 1170, 3850, 1315, 1611, 1530, 1859, 2209, 4183, 1408, 1403, 941, 4033, 3623, 3596, 1461, 1848, 1173, 1928, 1459, 1765, 1826, 3719, 1931, 3584, 4004, 3591, 3967, 4168, 3957, 3878, 4165, 4191, 3980, 4058, 4200, 4336, 3958, 1260, 4051, 3798, 4032, 1774, 4322, 3991, 4106, 1641, 1570, 3978, 3965, 4464, 3813, 4154, 1365, 4257, 3846, 4345, 4379, 3603, 1693, 3937, 3801, 1787, 1214, 4483, 4201, 1898, 1845, 1226, 1220, 4245, 1347, 3867, 1900, 3640, 3916, 4089, 1209, 3745, 3988, 3975, 4236, 4075, 4146, 4256, 4308, 4000, 4148, 3588, 3868, 4403, 3883, 4326, 4393, 3895, 4237, 3955, 3727, 4005, 4092, 4372, 4283, 1553, 3805, 4151, 1281, 1681, 4489, 3982, 4437, 3597, 4342, 3872, 3987, 4490, 3876, 3668, 4300, 1679, 1242, 3598, 3583, 3647, 389, 4304, 3793, 3779, 1937, 1907, 4042, 3648, 3996, 3800, 4367, 4099, 1807, 3887, 4428, 1625, 1390, 1884, 1682, 4364, 4306, 3869, 1278, 1672, 942, 1505, 1542, 1709, 1915, 3600, 3914, 1968, 3948, 1670, 3811, 1865, 1362, 943, 1716, 3961, 1506, 4221, 1376, 944, 1683, 4276, 1445, 1721, 1632, 3607, 1328, 1455, 1913, 1497, 1317, 1951, 1778, 1379, 3768, 4225, 1668, 945, 390, 391, 4406, 4341, 1480, 392, 393, 394, 395, 1714, 1422, 396, 2043, 946, 2265, 397, 3618, 4433, 1177, 3898, 398, 2251, 947, 948, 2212, 949, 950, 399, 951, 400, 1965, 4640, 2345, 4471, 952, 953, 401, 2475, 403, 404, 4758, 954, 955, 2437, 4139, 1482, 3602, 4434, 3721, 1592, 1825, 1698, 1519, 1352, 4202, 4409, 1977, 1917, 405, 406, 407, 408, 956, 957, 2267, 1631, 1684, 409, 2054, 3889, 958, 410, 2117, 411, 959, 412, 960, 2443, 4712, 4619, 2285, 413, 414, 415, 961, 2352, 2417, 962, 1905, 416, 963, 417, 418, 2382, 3675, 1833, 3974, 419, 964, 420, 421, 965, 966, 967, 968, 2365, 969, 970, 422, 1897, 2056, 2309, 1272, 4754, 2207, 971, 423, 4133, 3830, 4865, 972, 424, 973, 425, 4955, 426, 974, 2109, 2380, 427, 1708, 4676, 428, 4141, 429, 430, 3749, 431, 1619, 975, 4044, 3590, 1944, 4126, 1923, 1706, 432, 976, 977, 978, 4867, 4400, 433, 434, 1606, 979, 435, 980, 2604, 2895, 981, 436, 3448, 4959, 4563, 2188, 437, 438, 2055, 1692, 982, 2388, 2243, 983, 2035, 2120, 4940, 439, 440, 441, 2474, 4900, 2052, 4764, 3862, 4055, 4358, 984, 2435, 4589, 2276, 2401, 985, 1664, 443, 2073, 2405, 986, 4309, 4045, 3854, 3682, 2491, 444, 445, 1972, 2688, 4366, 3425, 3231, 3649, 2759, 2724, 3873, 3755, 1216, 3599, 3775, 2754, 2606, 3471, 3234, 2565, 2803, 2562, 2684, 3411, 3405, 2690, 1255, 3694, 446, 3985, 3535, 1306, 4084, 3282, 447, 1353, 2168, 1780, 987, 988, 989, 2126, 448, 449, 2107, 450, 2031, 990, 451, 452, 991, 1485, 2242, 453, 2286, 992, 1728, 993, 4703, 994, 995, 454, 1696, 996, 2039, 997, 998, 3116, 1869, 456, 4759, 2500, 4798, 2262, 4562, 457, 1386, 999, 458, 4768, 4982, 4778, 2040, 1000, 4981, 3879, 2698, 459, 460, 1001, 461, 1447, 462, 1002, 2042, 2339, 1003, 463, 464, 4425, 1645, 465, 1004, 466, 2328, 467, 468, 469, 1231, 1468, 470, 471, 2496, 472, 473, 1005, 474, 2108, 4725, 1006, 476, 1273, 1007, 1744, 1488, 1659, 477, 478, 4598, 1604, 4753, 2493, 479, 1008, 1009, 1010, 1011, 1012, 1013, 1014, 481, 4313, 482, 483, 1499, 484, 1015, 4761, 2091, 2386, 2513, 1016, 4073, 1777, 2172, 485, 2205, 4592, 4545, 4720, 486, 1458, 4274, 2122, 4905, 4796, 2152, 4539, 4528, 4904, 4842, 4986, 4639, 4846, 4623, 4650, 4595, 2195, 4681, 487, 2182, 4710, 1775, 2083, 4205, 1526, 4586, 1697, 1017, 2000, 4692, 2480, 2017, 488, 2335, 489, 4969, 1894, 1882, 1817, 1880, 490, 1018, 3917, 3616, 4311, 1800, 4473, 4085, 4401, 1310, 3783, 3765, 1538, 3870, 491, 1948, 3699, 1735, 3792, 4290, 2074, 492, 5001, 2136, 493, 2211, 4532, 494, 2421, 495, 4090, 2378, 2210, 2247, 2478, 2047, 496, 4620, 4978, 1019, 2012, 1803, 3642, 497, 1322, 4752, 1020, 498, 1021, 2235, 2302, 2488, 4665, 4699, 4608, 4781, 499, 2049, 2404, 4685, 500, 501, 1022, 502, 1333, 503, 1023, 4686, 4804, 504, 4727, 505, 506, 4805, 2065, 1890, 1024, 507, 508, 509, 2110, 1025, 510, 1026, 3608, 1732, 511, 2397, 1864, 1816, 1531, 512, 513, 2451, 3636, 4892, 514, 1699, 4593, 1027, 4987, 515, 2495, 4660, 1028, 516, 1029, 2409, 1366, 2112, 2178, 2124, 2376, 5011, 4572, 4957, 4789, 4543, 4664, 4678, 4746, 2489, 4922, 2145, 1030, 4832, 4950, 1261, 4027, 3478, 3763, 2959, 1293, 2462, 517, 3197, 1595, 3413, 2067, 1031, 2228, 1448, 518, 4698, 4616, 2057, 2305, 2133, 2061, 4526, 4617, 1032, 1033, 2429, 2311, 1675, 1797, 519, 4578, 2271, 4693, 4604, 2466, 2148, 2420, 520, 4854, 2381, 2315, 2284, 4813, 521, 1034, 522, 523, 1999, 3759, 1215, 4122, 1730, 524, 525, 526, 3966, 4573, 5008, 1035, 527, 4973, 2508, 528, 3911, 529, 3289, 1821, 530, 531, 2426, 1036, 532, 1874, 533, 534, 1037, 1038, 536, 1039, 537, 538, 539, 1040, 3767, 1929, 1041, 1042, 3683, 2100, 4853, 2300, 2165, 540, 2105, 541, 4906, 542, 1338, 2292, 2021, 1616, 1901, 1796, 1517, 4331, 4332, 4466, 2719, 3803, 4123, 4233, 1824, 3129, 3087, 3505, 4158, 4254, 1449, 2121, 1044, 3720, 4351, 4414, 1673, 3453, 3254, 2501, 1649, 543, 544, 545, 546, 1045, 547, 2225, 4240, 3580, 4680, 1046, 548, 549, 1047, 550, 2598, 551, 552, 553, 3819, 1259, 4062, 1048, 554, 2841, 1049, 1050, 3515, 1433, 1323, 4301, 555, 556, 1051, 557, 558, 1052, 1053, 3738, 1567, 559, 1054, 1270, 3857, 1055, 2151, 560, 2175, 2089, 4514, 2198, 2193, 1257, 1238, 3662, 561, 2186, 1057, 562, 1058, 563, 4872, 2097, 2436, 564, 1059, 565, 566, 1060, 1061, 2231, 4203, 1899, 3981, 1062, 1303, 4116, 567, 1063, 568, 569, 570, 2367, 1946, 3620, 1064, 1514, 4002, 3679, 3964, 3707, 3666, 1348, 4273, 1804, 4497, 571, 1401, 4438, 1895, 1264, 572, 1912, 573, 3939, 4170, 4056, 1271, 1065, 1521, 1221, 1066, 1451, 1654, 3934, 4080, 4352, 574, 1700, 3739, 1565, 1419, 1811, 3950, 1690, 1397, 3716, 1569, 1437, 1674, 4337, 1285, 4268, 1183, 3726, 3881, 4134, 4347, 4012, 3938, 4066, 4198, 4416, 4164, 3630, 4229, 4292, 4193, 4325, 4375, 4371, 4432, 4215, 1753, 3944, 1409, 4195, 1729, 4223, 1540, 4455, 1068, 1069, 4512, 1723, 1070, 3750, 3633, 4070, 4104, 4162, 4235, 1863, 4346, 1881, 1071, 1814, 1572, 575, 4443, 3761, 1346, 1587, 1072, 3592, 576, 1891, 4469, 1275, 577, 1950, 1963, 4129, 1073, 1296, 1360, 1551, 3733, 4111, 3993, 4108, 3949, 1287, 1713, 1556, 1736, 1995, 1435, 1424, 1705, 1861, 1197, 1254, 4120, 1545, 4417, 1469, 1292, 2185, 1785, 1236, 4293, 1827, 3839, 3983, 4395, 1957, 578, 3928, 4295, 3715, 3855, 3609, 1990, 4076, 4175, 3927, 1757, 1650, 4299, 1773, 2004, 1267, 1364, 579, 1462, 1879, 4007, 3729, 3665, 3722, 1691, 1712, 1074, 1624, 1751, 1394, 3924, 3952, 580, 581, 2003, 1343, 2203, 1559, 1250, 1555, 2304, 582, 2395, 4114, 1818, 1075, 583, 1076, 1077, 1704, 4448, 584, 4882, 1078, 1079, 1786, 585, 3354, 1832, 586, 3432, 2891, 587, 588, 4583, 2505, 1903, 2077, 4936, 4658, 4830, 2446, 1080, 2278, 1081, 1082, 4459, 1083, 589, 1563, 1084, 2113, 590, 591, 1085, 2256, 592, 2308, 593, 594, 595, 4931, 2407, 1858, 597, 598, 1453, 2559, 2590, 2738, 4478, 4069, 1809, 1327, 4150, 3260, 3481, 3672, 3625, 2008, 4439, 3852, 3997, 1411, 599, 3847, 4993, 1268, 4050, 3377, 4424, 1496, 4143, 4493, 3492, 1962, 1412, 2455, 600, 2457, 2321, 1086, 601, 4017, 4477, 1794, 2483, 4776, 2291, 602, 4263, 3072, 2009, 2199, 1754, 1087, 1088, 3888, 603, 604, 4777, 2324, 605, 1368, 3827, 4103, 606, 607, 1089, 2220, 4549, 1090, 1571, 1091, 1438, 608, 1092, 609, 2320, 2069, 610, 611, 1093, 612, 1094, 3701, 4389, 613, 4897, 1603, 614, 1095, 2154, 5000, 615, 616, 2263, 1332, 1715, 4369, 1652, 1096, 617, 1541, 618, 1921, 1733, 1373, 1870, 619, 4218, 1798, 2387, 1097, 1098, 1099, 1100, 620, 1702, 621, 622, 4855, 4847, 2398, 2239, 1101, 1667, 1384, 623, 4745, 3700, 1788, 1600, 624, 2098, 625, 4550, 4721, 4960, 2473, 4792, 4675, 1102, 1423, 626, 2771, 627, 1339, 3875, 628, 629, 3070, 4565, 2118, 2015, 4818, 4860, 2557, 2795, 2906, 2103, 4869, 2029, 3299, 3118, 4932, 4838, 4901, 4908, 4996, 4779, 2377, 4657, 4646, 4875, 4627, 4515, 4876, 4965, 4605, 4576, 2028, 4985, 4799, 4850, 1103, 4757, 4747, 1614, 1947, 2237, 630, 631, 4997, 4618, 4479, 3766, 632, 1104, 1105, 4886, 1106, 2432, 4827, 633, 1107, 4530, 634, 2371, 1108, 4536, 635, 1813, 636, 2431, 4866, 4991, 4814, 4560, 4956, 637, 4555, 1109, 4633, 2213, 638, 639, 3706, 1110, 640, 1111, 641, 4581, 4893, 4831, 2481, 4644, 4734, 2190, 4881, 4837, 4888, 4648, 642, 4548, 4807, 4896, 4868, 2374, 1112, 4823, 2164, 1113, 3735, 3390, 1694, 3431, 2838, 3483, 3464, 3848, 2558, 3314, 3086, 3029, 2956, 3517, 2651, 2914, 2680, 2632, 3121, 3100, 3528, 3526, 3084, 4220, 3304, 2846, 1186, 3235, 2903, 3559, 2687, 3409, 3237, 2900, 2999, 3349, 3171, 2752, 3262, 3504, 3047, 4376, 3193, 3430, 2525, 2670, 2911, 3508, 2776, 2697, 3200, 2790, 3323, 2543, 2874, 2614, 3904, 3373, 3054, 2617, 4242, 3621, 2708, 4179, 4398, 3959, 4935, 1269, 3095, 1286, 3624, 4481, 1432, 3511, 2735, 4381, 3295, 1585, 2390, 1568, 1114, 1766, 3221, 2643, 2739, 643, 4735, 4629, 1115, 4918, 4688, 3920, 644, 4723, 4949, 4607, 4719, 1116, 645, 646, 4611, 2353, 4603, 4762, 4819, 2221, 4636, 4992, 2307, 647, 1801, 4279, 3762, 1637, 1509, 4843, 4797, 4590, 4516, 4541, 2200, 4580, 4858, 648, 649, 2477, 4724, 4551, 4674, 1118, 1119, 2965, 2369, 2695, 3293, 650, 651, 4862, 4722, 4944, 1120, 652, 1121, 4983, 4784, 4877, 653, 654, 1122, 3264, 655, 2076, 4849, 656, 657, 2447, 658, 659, 2191, 4035, 2910, 3391, 2808, 3099, 2913, 3676, 2852, 3284, 2731, 1609, 2375, 3537, 3994, 1319, 4467, 1802, 1227, 1623, 660, 4844, 4714, 4979, 4812, 2192, 1123, 661, 2364, 662, 663, 664, 1124, 1125, 665, 2487, 4899, 2138, 1126, 666, 667, 4569, 4917, 2322, 1127, 1128, 1129, 668, 669, 1130, 670, 1131, 1527, 1132, 671, 1772, 2314, 1133, 1134, 2470, 1135, 672, 2236, 4716, 673, 4600, 2196, 674, 2456, 4588, 4963, 4851, 4558, 4557, 4697, 4610, 4773, 4687, 4708, 4910, 2123, 1136, 1137, 2358, 5005, 2208, 4952, 4945, 1933, 1731, 1793, 675, 676, 3342, 1138, 1139, 677, 4840, 4597, 4870, 1140, 4990, 4954, 4916, 678, 1141, 4737, 4527, 2253, 4531, 679, 1142, 1143, 680, 4771, 1144, 4638, 681, 4705, 4525, 4898, 2325, 2415, 5004, 1145, 682, 683, 2141, 1146, 684, 685, 2445, 686, 687, 4861, 688, 3822, 689, 690, 4743, 691, 1147, 1601, 692, 1148, 693, 4537, 4825, 4625, 4621, 3905, 694, 695, 1414, 1149, 696, 2027, 2159, 4756, 4690, 4859, 4793, 4575, 2160, 4828, 4731, 4802, 4750, 1150, 2081, 2258, 697, 1795, 1372, 1695, 1866, 1151, 4115, 1719, 2280, 4662, 698, 2176, 2217, 1920, 699, 700, 701, 4999, 1544, 4739, 2512, 702, 703, 4031, 4305, 1636, 1393, 2010, 3810, 4452, 3677, 4227, 1277, 1400, 4402, 4157, 4197, 1337, 1253, 1532, 4028, 3989, 2449, 4715, 704, 2050, 1493, 1854, 1902, 1510, 1152, 2340, 4182, 706, 4652, 2442, 2484, 707, 708, 709, 4667, 1153, 2412, 4732, 4476, 2053, 710, 1375, 711, 712, 713, 4738, 4811, 4570, 1245, 714, 2045, 4707, 715, 2169, 4713, 1841, 4234, 4924, 1154, 1314, 4096, 2023, 717, 4895, 2414, 718, 1155, 719, 720, 2063, 1311, 4921, 721, 4833, 4903, 4885, 4666, 2249, 4217, 1156, 723, 1157, 1627, 2116, 2287, 1158, 2330, 4826, 4622, 4740, 724, 4700, 725, 1159, 5013, 4894, 726, 2434, 1953, 1160, 1201, 727, 3787, 2046, 1161, 728, 729, 2485, 2044, 4568, 3747, 2248, 730, 731, 1846, 2507, 2368, 1162, 2019, 2333, 3815, 2005, 2266, 1964, 2347, 732, 2177, 2059, 4958, 4927, 1822, 4815, 1262, 2094, 4480, 1537, 1291, 2419, 1318, 4628, 4294, 4926, 1582, 2162, 733, 4587, 734, 735, 3439, 2833, 4287, 4509, 4505, 4267, 3697, 3272, 4112, 2967, 3651, 1991, 1805, 1628, 3705, 2479, 736, 1195, 4863, 1163, 3859, 1164, 2394, 1165, 2355, 2351, 4835, 2259, 2275, 1166, 4968, 2423, 737, 1167, 4989, 4612, 2127, 1745, 1973, 4767, 1168, 2273, 2310, 3807, 4307, 1169, 2303, 1454, or 1781.

[0220] A VP capsid polypeptide may have a 581 to 589 region having a sequence of SEQ ID NO: 5014, wherein X³ of SEQ ID NO: 5014 is not E. In some embodiments, the 581 to 589 region has a sequence of any one of SEQ ID NOs: 2498, 4884, 738, 739, 4177, 1289, 740, 14, 15, 741, 742, 743, 16, 744, 17, 18, 745, 3477, 1548, 3051, 2982, 2171, 2877, 746, 19, 20, 3036, 3426, 3073, 3169, 747, 2406, 3362, 2784, 4889, 21, 3192, 4942, 22, 23, 1638, 748, 24, 25, 749, 26, 27, 1703, 1836, 28, 2038, 2301, 3660, 29, 750, 30, 31, 32, 2095, 1640, 33, 34, 35, 36, 37, 4742, 2450, 38, 4925, 39, 751, 752, 1653, 1205, 3795, 753, 4288, 4219, 2770, 2962, 4241, 4107, 2718, 3317, 4391, 4053, 3263, 2553, 3947, 2710, 2608, 3467, 2796, 2961, 2529, 3320, 2674, 2635, 3446, 3053, 3250, 3688, 1182, 1998, 4320, 3351, 2655, 3514, 2779, 3194, 3319, 3224, 3281, 3708, 2807, 3562, 3274, 3374, 3013, 3416, 2981, 3065, 2777, 3469, 2977, 2638, 2972, 3059, 2574, 3380, 4262, 3167, 3368, 2781, 3547, 3386, 1225, 2960, 3485, 3370, 3443, 2824, 754, 1467, 3327, 3178, 3006, 3252, 2991, 3470, 2888, 2572, 3418, 2642, 2519, 3363, 40, 2633, 41, 42, 43, 755, 2511, 44, 45, 756, 46, 757, 47, 48, 1952, 758, 2341, 2410, 49, 3122, 2551, 3718, 4806, 2216, 3484, 3577, 759, 2080, 2072, 2034, 50, 1308, 1230, 3960, 1378, 2994, 3080, 2589, 3681, 51, 4694, 2257, 52, 760, 53, 2389, 4934, 4951, 761, 4591, 762, 4659, 54, 2146, 3925, 55, 3654, 2087, 2346, 4766, 4682, 4984, 4744, 56, 763, 764, 4626, 4702, 57, 58, 59, 60, 61, 4086, 1740, 1660, 765, 766, 62, 1966, 2032, 2499, 2332, 767, 63, 2096, 2181, 4913, 64, 768, 769, 770, 2384, 2402, 771, 65, 66, 2111, 67, 772, 2458, 2197, 68, 3816, 69, 2599, 2706, 2497, 70, 2234, 2183, 2399, 71, 4769, 2366, 72, 73, 74, 3865, 1549, 1361, 2453, 3882, 773, 3713, 1942, 2140, 75, 1312, 4501, 76, 77, 774, 1413, 775, 776, 78, 1560, 4289, 3757, 79, 3593, 4043, 1806, 3908, 4397, 1615, 4415, 3723, 2006, 3754, 1470, 4360, 80, 3945, 2854, 3523, 3669, 1356, 777, 2132, 2379, 81, 82, 4065, 83, 84, 2030, 1294, 2413, 2064, 1484, 85, 4594, 86, 778, 87, 3891, 4456, 4040, 4496, 1982, 2001, 1478, 1189, 88, 1490, 1885, 1926, 89, 90, 91, 779, 2270, 780, 2161, 1180, 92, 781, 782, 783, 93, 2356, 784, 785, 786, 94, 95, 787, 788, 1831, 1867, 96, 4458, 97, 1970, 4656, 2173, 1936, 2349, 1590, 4585, 98, 99, 100, 789, 790, 1298, 101, 1688, 791, 792, 2007, 4556, 2070, 102, 793, 4632, 103, 794, 795, 104, 105, 106, 2229, 796, 4980, 4691, 107, 2440, 1849, 108, 2014, 797, 4736, 2509, 2018, 2227, 4787, 109, 1579, 110, 1906, 111, 2428, 798, 2075, 112, 2411, 113, 2359, 799, 4848, 800, 2461, 1444, 2313, 2350, 4579, 4821, 801, 114, 2329, 4834, 115, 1344, 116, 802, 117, 118, 119, 4929, 4677, 120, 2158, 121, 803, 804, 1463, 805, 122, 2139, 2290, 1760, 2465, 123, 2424, 2058, 2230, 124, 4717, 806, 125, 126, 2370, 127, 4521, 128, 4971, 4994, 807, 2085, 4533, 129, 130, 131, 132, 4933, 808, 2336, 2026, 2204, 809, 810, 2281, 133, 1978, 134, 811, 812, 135, 136, 137, 138, 813, 814, 139, 4673, 140, 815, 1326, 141, 142, 143, 2344, 4544, 5009, 144, 145, 816, 4654, 4816, 1634, 1302, 817, 146, 818, 147, 148, 149, 4546, 150, 151, 152, 153, 154, 155, 819, 820, 156, 2149, 157, 2295, 821, 158, 159, 160, 161, 4631, 2441, 162, 163, 164, 165, 166, 822, 167, 168, 169, 170, 171, 823, 172, 4613, 824, 1651, 173, 1483, 174, 175, 825, 176, 177, 178, 179, 4624, 2170, 4809, 4520, 180, 826, 827, 181, 828, 4695, 4911, 182, 4582, 4873, 4596, 2020, 183, 4641, 829, 184, 185, 2244, 4647, 186, 187, 188, 189, 190, 2114, 830, 191, 192, 193, 194, 2071, 4615, 2361, 195, 4852, 2187, 4914, 4947, 196, 1391, 197, 4534, 4726, 4788, 198, 199, 4920, 831, 2240, 2223, 200, 201, 202, 203, 2106, 2503, 4775, 204, 205, 832, 833, 206, 834, 2232, 2294, 207, 2166, 208, 209, 210, 835, 836, 1334, 837, 3901, 3312, 2649, 1301, 211, 212, 1450, 4386, 3028, 213, 1446, 214, 2206, 215, 1896, 1522, 3490, 838, 216, 2241, 217, 218, 4653, 219, 1612, 220, 221, 222, 839, 223, 4953, 2360, 840, 224, 4928, 4741, 225, 2088, 4751, 5007, 4542, 226, 227, 4890, 4519, 4883, 228, 4786, 229, 230, 231, 2393, 2448, 841, 842, 232, 233, 4782, 234, 4962, 2269, 843, 235, 844, 236, 237, 4930, 845, 846, 238, 847, 4704, 239, 848, 849, 2150, 850, 851, 852, 853, 1536, 240, 854, 241, 242, 243, 244, 245, 246, 247, 248, 4923, 2245, 4696, 855, 4634, 856, 249, 250, 251, 252, 253, 254, 255, 857, 2115, 4880, 2218, 256, 257, 258, 259, 858, 859, 260, 261, 860, 861, 862, 262, 4966, 863, 864, 263, 4749, 4970, 2296, 2318, 865, 2326, 264, 1241, 265, 266, 866, 1477, 267, 867, 4977, 268, 868, 269, 4668, 5002, 270, 869, 870, 271, 871, 872, 272, 4822, 4709, 873, 4655, 4972, 2392, 874, 1252, 273, 1591, 4975, 875, 274, 2025, 275, 1980, 276, 876, 877, 2066, 277, 278, 279, 4670, 280, 2323, 2288, 2334, 4939, 4689, 281, 878, 1892, 879, 1539, 2214, 2215, 880, 2327, 881, 882, 4601, 883, 1295, 3601, 3877, 1930, 1420, 1678, 1460, 2306, 884, 282, 1799, 283, 284, 4988, 4553, 4772, 4817, 2260, 285, 1626, 2082, 885, 286, 1374, 886, 2119, 2468, 287, 2408, 1620, 1290, 2425, 2482, 4564, 4671, 2282, 288, 2354, 1354, 2033, 289, 887, 290, 888, 291, 1956, 2362, 2467, 889, 2357, 4547, 4765, 292, 4794, 2391, 4324, 293, 890, 294, 295, 4138, 891, 2297, 2254, 296, 2224, 3903, 297, 892, 3829, 298, 299, 3809, 4271, 3844, 1436, 300, 1515, 1617, 4701, 2174, 301, 1961, 4649, 5010, 302, 303, 304, 305, 2452, 2147, 306, 2293, 1589, 893, 4370, 4841, 2342, 307, 308, 309, 894, 2246, 2155, 3646, 4059, 1431, 1331, 310, 311, 4836, 4948, 312, 895, 1779, 313, 314, 315, 316, 896, 1558, 1552, 317, 2312, 318, 319, 897, 320, 898, 321, 322, 899, 1958, 2022, 2016, 900, 2454, 323, 2427, 2134, 324, 901, 325, 902, 326, 2373, 4803, 2459, 1491, 327, 328, 903, 2463, 2264, 329, 330, 904, 1635, 4820, 905, 2506, 331, 4706, 2092, 4484, 1756, 906, 907, 4661, 2179, 4584, 4609, 332, 4907, 4635, 4529, 4683, 4523, 4561, 333, 2337, 3536, 2701, 2799, 3332, 3294, 3159, 3069, 2637, 3025, 2782, 3247, 3350, 2692, 2586, 3004, 3049, 2694, 2650, 3554, 2983, 3403, 3214, 3163, 2541, 3090, 3097, 3462, 1430, 2941, 3486, 2842, 3558, 3104, 3037, 3419, 2780, 2931, 1276, 2928, 2609, 3068, 3128, 2548, 2538, 2618, 2789, 3228, 2657, 3189, 2128, 2863, 3307, 3300, 2546, 3048, 3543, 2946, 2975, 3346, 3067, 2728, 2955, 3408, 3027, 3094, 3203, 2988, 2751, 2953, 2566, 2578, 2823, 3063, 3335, 3000, 3181, 3011, 3138, 3389, 2805, 3074, 2894, 3149, 2560, 3417, 3265, 3378, 2901, 2837, 2822, 2745, 3473, 3530, 3040, 2597, 3509, 3522, 3161, 2926, 3209, 3105, 3400, 2630, 2905, 2671, 2818, 2806, 2702, 2709, 2400, 3549, 3538, 2534, 2773, 2623, 3491, 3243, 3136, 2693, 3164, 3343, 2918, 2555, 2794, 2679, 3510, 3110, 2672, 3442, 2929, 3184, 3488, 2135, 4763, 3414, 3093, 2996, 3141, 3544, 3102, 2856, 2957, 3466, 3461, 2788, 2660, 3344, 3204, 2720, 3379, 2826, 1789, 2396, 2785, 3249, 3527, 4460, 3352, 2051, 2569, 4457, 2011, 4857, 2163, 4783, 4319, 3906, 1533, 1755, 1888, 4248, 1557, 2153, 3804, 1363, 1934, 1602, 1404, 4188, 1330, 4349, 3337, 3533, 2629, 3038, 2539, 3567, 3291, 3348, 3115, 3359, 2993, 3079, 3506, 2527, 2963, 2938, 2516, 3113, 1345, 2639, 3143, 3044, 2747, 3154, 3280, 3039, 2743, 2902, 3056, 2554, 2522, 3103, 3210, 3434, 2656, 4251, 4166, 4196, 3206, 3328, 2588, 3553, 2714, 3078, 3222, 3137, 3357, 2717, 2944, 3012, 3220, 3202, 2811, 3083, 3269, 3566, 2699, 2515, 3023, 2533, 3288, 3075, 3005, 2685, 3058, 2976, 2622, 3333, 3463, 2939, 3521, 3268, 3117, 2626, 2616, 3240, 2570, 3565, 2919, 3157, 2849, 3444, 2631, 3420, 2659, 3325, 3186, 2920, 3258, 3440, 3457, 3310, 2761, 3134, 2621, 3531, 2711, 2774, 2867, 2585, 3155, 2620, 3156, 2844, 3126, 3160, 2909, 3542, 3225, 2887, 3474, 3218, 2744, 2896, 3135, 3424, 3498, 3529, 2661, 2667, 2549, 2819, 2768, 2935, 3182, 2772, 3230, 3043, 2922, 3581, 3524, 2869, 2610, 3298, 2775, 3108, 2603, 3614, 2612, 2860, 3187, 3238, 3786, 4385, 3016, 3436, 2876, 2987, 3532, 3438, 3561, 3259, 2663, 2890, 3433, 3071, 3018, 2580, 2755, 3015, 2540, 3398, 2664, 2583, 2830, 2644, 2641, 3513, 2725, 2723, 3338, 3556, 2866, 2514, 2932, 2753, 2862, 2899, 2605, 2989, 3096, 3124, 2985, 2716, 3145, 3017, 2591, 2640, 3033, 1853, 3216, 3316, 3412, 2971, 3256, 3153, 3575, 3339, 2915, 2531, 3552, 3475, 3060, 3375, 2756, 3382, 2847, 2859, 3251, 3702, 3423, 2537, 2801, 3076, 2696, 3092, 3459, 3144, 3441, 2802, 3479, 2907, 3512, 3518, 3021, 2871, 3032, 2647, 2945, 3045, 2763, 3313, 3034, 3315, 3541, 2746, 2669, 2524, 3003, 2732, 3166, 3046, 3306, 2873, 3364, 3253, 3215, 3061, 2804, 2722, 2964, 2990, 2836, 4098, 4449, 3173, 2762, 3737, 2628, 3507, 2564, 3031, 2872, 3360, 2658, 2930, 2904, 3244, 3217, 3311, 3445, 2840, 3372, 2958, 3098, 3356, 3456, 3388, 2624, 3207, 2576, 2742, 2665, 2815, 3052, 3421, 2593, 3242, 2535, 2966, 2898, 2858, 2943, 2668, 2798, 3196, 2528, 2713, 3001, 2691, 2948, 2767, 2544, 3302, 2734, 2893, 2592, 2861, 3502, 2969, 2582, 3229, 2676, 2545, 3255, 3330, 2547, 3257, 2882, 3151, 3088, 2883, 3318, 2645, 2733, 2587, 3500, 3008, 2715, 2845, 3183, 2654, 3233, 3267, 2741, 2827, 2704, 3091, 2832, 2736, 3177, 3271, 2835, 2908, 3176, 2947, 3292, 3191, 2517, 3026, 3082, 3392, 3381, 2584, 2712, 3213, 3451, 2634, 3150, 2810, 3303, 2573, 3460, 2615, 3394, 2828, 3329, 4377, 4499, 3555, 2974, 3782, 3629, 3578, 3885, 2817, 3248, 2954, 3334, 3571, 3345, 3551, 3384, 3422, 1357, 1844, 2530, 2973, 4418, 4081, 3951, 1764, 1671, 1852, 334, 1843, 3449, 3185, 3399, 2786, 3055, 3472, 3397, 2601, 3564, 3277, 4373, 3548, 3179, 3407, 3841, 3347, 3142, 4255, 4431, 3241, 3077, 2700, 3147, 2648, 3283, 2829, 3278, 2581, 2536, 4363, 2848, 3410, 2797, 2523, 2520, 2721, 3496, 2571, 3198, 3219, 3030, 2673, 2921, 3837, 3301, 3322, 2705, 3239, 2949, 3369, 3396, 2892, 2897, 2766, 3174, 3297, 2550, 2889, 2933, 2793, 2627, 2677, 3119, 2596, 3226, 3172, 3089, 2868, 2839, 3942, 3120, 3286, 2843, 3465, 1564, 3946, 4222, 1504, 3999, 2682, 1875, 2865, 3539, 3168, 2864, 3308, 3557, 2940, 3109, 3503, 2625, 3455, 3114, 2595, 3331, 2978, 2518, 2521, 4079, 3024, 3573, 2952, 2653, 1769, 3180, 2813, 2652, 2600, 2816, 3201, 3188, 3270, 2997, 2992, 3009, 3520, 2936, 3275, 3165, 3447, 3131, 3305, 2809, 2792, 2729, 2814, 2619, 3266, 2825, 3066, 2857, 2998, 3064, 2681, 3035, 3279, 2764, 3480, 3127, 2912, 3010, 2607, 3211, 3111, 3041, 1573, 3909, 4269, 3487, 3489, 3019, 335, 1266, 1415, 2980, 3428, 2444, 3435, 3482, 3020, 2748, 2646, 2787, 2760, 2563, 3085, 3133, 3158, 3170, 2703, 3494, 2556, 2552, 3395, 3245, 3404, 2675, 2791, 2252, 4845, 1911, 4856, 2363, 908, 1935, 4711, 4728, 2460, 4517, 2749, 3341, 3355, 2575, 2942, 2886, 2758, 2594, 3495, 2884, 3516, 3042, 2737, 2923, 3563, 2855, 3476, 2611, 2937, 3383, 3497, 3402, 3162, 2662, 2875, 3223, 2878, 2079, 1808, 3285, 2757, 3057, 2951, 3519, 2579, 2853, 3387, 3401, 3493, 3393, 1608, 3365, 2885, 3574, 3081, 3007, 3568, 3152, 3367, 3358, 336, 2268, 3468, 3290, 3550, 3132, 2726, 2879, 3190, 3309, 2613, 2765, 3106, 1355, 3454, 2851, 2881, 3232, 3458, 3326, 3353, 2927, 3212, 2950, 3376, 3208, 3062, 3612, 3195, 3385, 2686, 2602, 3569, 3123, 2727, 1622, 2821, 2636, 2750, 2850, 3050, 2925, 3336, 3540, 2689, 3139, 2526, 3361, 3022, 3427, 3107, 3140, 3371, 3276, 2831, 3501, 2924, 3366, 3199, 3101, 3321, 3499, 2917, 2683, 2800, 2812, 3340, 3227, 3148, 3657, 4446, 1746, 1464, 1886, 2666, 3246, 3130, 3560, 3236, 2730, 3572, 1607, 3689, 2968, 1457, 1500, 909, 337, 1184, 3450, 2577, 2567, 2532, 3415, 2934, 2984, 2568, 4147, 3002, 2986, 910, 2979, 2542, 2338, 2492, 1762, 4472, 1472, 1529, 2319, 2131, 4057, 4937, 2048, 1976, 4507, 1583, 338, 2078, 2372, 339, 911, 1711, 340, 912, 2013, 913, 2277, 914, 2403, 341, 915, 4672, 4902, 916, 342, 1594, 4440, 917, 343, 344, 4559, 918, 2233, 919, 345, 920, 346, 921, 922, 347, 2226, 348, 2180, 2298, 349, 350, 2099, 2036, 351, 4808, 923, 924, 4498, 1518, 3728, 3637, 3570, 3429, 4091, 2870, 2995, 4338, 3205, 2880, 3261, 1994, 3968, 4291, 4204, 4071, 4034, 1742, 2037, 352, 2820, 3912, 3287, 1218, 1190, 4145, 353, 2422, 354, 355, 925, 1782, 2184, 2261, 2490, 926, 927, 928, 4630, 2137, 3610, 356, 357, 4729, 358, 359, 4224, 1918, 1959, 1840, 3736, 2471, 1770, 929, 930, 931, 4155, 360, 361, 362, 932, 363, 364, 1279, 2289, 365, 1543, 366, 2156, 2472, 367, 4049, 1633, 1722, 368, 369, 1495, 1566, 370, 4967, 371, 372, 373, 1211, 1873, 2101, 2494, 1726, 374, 1442, 933, 1748, 4142, 1434, 1358, 1191, 3732, 4110, 4039, 4411, 4506, 4270, 4156, 3780, 4036, 4030, 4016, 1550, 3899, 1247, 1855, 1181, 3919, 1639, 3664, 1244, 4140, 3930, 4117, 4189, 4001, 3799, 3643, 3619, 1240, 1686, 1479, 1307, 1575, 4296, 1665, 3871, 4135, 1605, 4408, 3604, 1274, 4149, 1313, 3741, 1938, 3709, 1727, 3893, 1280, 3622, 1784, 3834, 1752, 1983, 1743, 3979, 4461, 4113, 3817, 4232, 1340, 1489, 4214, 3902, 1857, 2510, 2316, 1904, 1219, 1486, 1512, 1481, 1516, 3820, 3789, 4252, 4047, 4330, 4082, 4094, 1574, 1248, 4078, 1872, 1426, 3785, 3687, 4318, 4243, 3866, 3704, 4172, 1621, 4315, 1192, 1513, 1856, 2476, 3324, 2769, 2678, 1561, 3296, 375, 2343, 376, 377, 1395, 1584, 4093, 4453, 3940, 3778, 4374, 4210, 4009, 4264, 4339, 4368, 1738, 378, 1610, 4194, 4474, 4013, 4266, 1771, 1759, 1922, 3860, 3832, 1349, 1381, 3663, 1642, 1185, 4356, 3932, 1233, 4212, 3858, 1198, 4192, 3611, 1919, 1819, 3790, 3712, 1969, 4095, 1887, 4468, 1720, 4247, 934, 1790, 2002, 1657, 1663, 1336, 3894, 1554, 1494, 1405, 3576, 4314, 3695, 1851, 1850, 4362, 1815, 3845, 4511, 3656, 3638, 1406, 1596, 4454, 1443, 1661, 935, 4504, 1359, 1734, 3650, 1910, 1305, 1648, 3831, 4435, 1208, 1988, 4451, 1993, 1986, 3849, 1718, 4068, 1835, 1425, 1428, 1282, 4380, 1658, 1452, 1687, 4024, 379, 4072, 3791, 4491, 4323, 4014, 1304, 1440, 1511, 1981, 1676, 1547, 4422, 1283, 3861, 1383, 3644, 3691, 4259, 1749, 1418, 1176, 4216, 1924, 1421, 3992, 4423, 4253, 1618, 1871, 1256, 3748, 4119, 1297, 1586, 1251, 1299, 1954, 4450, 3990, 4029, 4097, 3890, 3796, 1389, 3711, 4344, 1578, 1476, 4343, 1202, 4413, 4384, 3808, 1647, 1475, 3892, 3674, 1739, 3926, 3595, 1943, 3756, 4405, 3973, 4109, 4159, 3744, 4387, 1960, 4275, 3781, 1535, 1210, 4492, 4365, 4118, 3655, 3886, 4278, 4383, 4485, 1392, 3751, 3931, 3986, 3678, 1249, 4353, 4208, 3710, 4238, 4213, 3969, 4436, 3175, 4128, 2970, 1228, 3534, 3437, 3406, 3641, 3639, 3954, 4335, 3995, 3582, 4475, 3784, 4470, 4010, 3802, 3941, 4427, 4396, 4348, 3587, 3818, 3864, 3956, 3863, 3731, 3814, 4067, 4354, 4350, 4334, 3821, 1932, 3929, 4171, 1258, 3824, 3631, 4465, 4494, 1320, 1398, 3828, 1204, 1223, 1284, 1685, 3773, 4209, 3014, 4462, 4246, 4190, 4312, 4023, 3760, 3753, 1178, 3884, 2783, 4038, 3545, 2916, 3112, 2834, 3880, 3673, 4102, 4399, 4048, 3752, 4207, 1235, 3943, 4355, 4087, 4100, 4327, 4037, 4163, 3918, 4486, 1243, 3933, 4178, 1662, 1643, 4152, 3634, 3617, 4445, 4303, 1370, 3838, 4199, 4284, 1213, 4382, 1399, 1187, 3714, 1828, 4487, 3615, 1842, 1501, 3746, 4018, 4420, 3606, 4121, 3724, 3935, 1941, 4419, 4282, 1955, 1949, 4310, 4488, 1577, 4127, 1288, 1171, 3670, 4052, 3627, 3777, 936, 1371, 3685, 1325, 1940, 380, 4482, 4258, 3812, 1581, 1860, 4124, 4508, 4500, 3652, 3972, 1309, 1630, 1528, 3717, 1217, 3692, 4430, 3764, 4316, 4285, 3645, 3971, 4421, 1172, 4026, 2740, 3125, 3546, 1725, 1206, 3842, 4404, 3690, 3962, 4513, 4340, 4329, 4410, 3703, 4136, 1763, 1487, 3589, 3907, 4153, 2707, 3730, 4426, 4180, 4041, 3923, 4444, 3851, 4429, 4361, 1441, 4394, 4302, 3758, 4510, 3742, 1868, 4077, 1710, 1939, 1335, 1666, 1407, 4187, 1193, 1188, 1196, 1724, 1717, 1200, 1646, 1997, 1975, 1701, 4280, 1613, 4006, 1984, 1351, 3653, 3833, 1593, 2561, 4442, 3900, 4298, 1761, 4388, 1820, 1597, 4317, 4249, 1341, 1203, 1680, 4441, 3628, 3725, 1945, 937, 4206, 1588, 1439, 3794, 4447, 1838, 3776, 3658, 4064, 1377, 4011, 4272, 4503, 1324, 1367, 3594, 3680, 1300, 1750, 3913, 3774, 1877, 1987, 1862, 3998, 1380, 4185, 3686, 3696, 4463, 1350, 4008, 4230, 3853, 4244, 4083, 381, 1909, 3897, 1546, 382, 3613, 3273, 3452, 3525, 1229, 4105, 3835, 383, 1263, 1234, 3970, 1492, 3856, 3586, 1175, 4321, 4020, 4144, 1224, 1199, 3667, 2778, 4412, 4407, 1812, 1810, 3823, 1416, 1427, 1507, 1878, 4333, 3146, 4281, 4211, 1179, 3843, 1669, 1677, 1524, 1525, 1974, 384, 1979, 1456, 1239, 4167, 3740, 1876, 1388, 1967, 1474, 385, 1342, 1471, 4176, 1232, 1989, 4125, 1741, 1508, 1580, 4060, 4378, 1576, 1212, 1893, 3921, 3585, 1174, 1396, 4061, 4015, 1207, 3698, 3825, 3922, 4021, 4181, 1598, 1916, 1429, 4502, 4231, 1321, 4390, 3693, 3734, 1382, 3684, 1747, 3806, 3896, 3635, 1768, 4025, 3976, 3840, 3963, 4286, 1502, 3836, 4161, 3659, 3743, 4130, 3605, 1385, 1783, 4392, 4328, 1316, 4173, 4265, 1246, 1985, 1629, 1829, 1737, 3826, 1473, 1992, 1883, 1656, 1837, 1914, 1839, 1834, 3984, 4495, 3910, 4160, 3671, 4184, 4132, 4250, 1503, 1237, 1523, 1417, 4063, 1562, 3977, 1971, 1707, 1847, 1792, 3769, 4074, 1534, 4239, 4003, 3915, 1689, 1776, 1599, 1265, 1410, 1823, 1498, 1329, 939, 386, 940, 387, 1655, 3874, 4261, 3626, 1791, 3579, 1644, 3936, 4054, 4260, 4359, 4131, 4297, 4357, 4022, 3770, 4046, 1222, 1996, 3788, 4169, 1925, 3953, 4228, 4226, 4277, 4101, 1889, 1369, 3797, 4088, 4019, 3771, 3632, 1402, 388, 1520, 1767, 1466, 1194, 4137, 1908, 1927, 1758, 3772, 3661, 4186, 4174, 1170, 3850, 1315, 1611, 1530, 1859, 2209, 4183, 1408, 1403, 941, 4033, 3623, 3596, 1461, 1848, 1173, 1928, 1459, 1765, 1826, 3719, 1931, 3584, 4004, 3591, 3967, 4168, 3957, 3878, 4165, 4191, 3980, 4058, 4200, 4336, 3958, 1260, 4051, 3798, 4032, 1774, 4322, 3991, 4106, 1641, 1570, 3978, 3965, 4464, 3813, 4154, 1365, 4257, 3846, 4345, 4379, 3603, 1693, 3937, 3801, 1787, 1214, 4483, 4201, 1898, 1845, 1226, 1220, 4245, 1347, 3867, 1900, 3640, 3916, 4089, 1209, 3745, 3988, 3975, 4236, 4075, 4146, 4256, 4308, 4000, 4148, 3588, 3868, 4403, 3883, 4326, 4393, 3895, 4237, 3955, 3727, 4005, 4092, 4372, 4283, 1553, 3805, 4151, 1281, 1681, 4489, 3982, 4437, 3597, 4342, 3872, 3987, 4490, 3876, 3668, 4300, 1679, 1242, 3598, 3583, 3647, 389, 4304, 3793, 3779, 1937, 1907, 4042, 3648, 3996, 3800, 4367, 4099, 1807, 3887, 4428, 1625, 1390, 1884, 1682, 4364, 4306, 3869, 1278, 1672, 942, 1505, 1542, 1709, 1915, 3600, 3914, 1968, 3948, 1670, 3811, 1865, 1362, 943, 1716, 3961, 1506, 4221, 1376, 944, 1683, 4276, 1445, 1721, 1632, 3607, 1328, 1455, 1913, 1497, 1317, 1951, 1778, 1379, 3768, 4225, 1668, 2383, 945, 390, 391, 4406, 4341, 1480, 392, 393, 394, 395, 1714, 1422, 396, 2043, 946, 2265, 397, 3618, 4433, 1177, 3898, 398, 2251, 947, 948, 2212, 949, 950, 399, 951, 400, 1965, 4640, 2129, 2345, 4471, 952, 953, 402, 2475, 403, 404, 4758, 955, 2437, 4139, 1482, 3602, 4434, 3721, 1592, 1825, 1698, 1519, 1352, 4202, 4409, 1977, 1917, 405, 406, 407, 408, 956, 2272, 957, 2267, 1631, 1684, 409, 2054, 3889, 958, 410, 2117, 411, 959, 412, 960, 2443, 4712, 4619, 2285, 414, 415, 961, 2352, 2417, 962, 1905, 416, 963, 417, 418, 3675, 1833, 3974, 419, 964, 420, 421, 965, 966, 967, 968, 2365, 969, 970, 422, 1897, 2056, 2309, 4733, 1272, 4754, 2207, 971, 423, 4133, 3830, 4865, 972, 424, 973, 425, 2068, 4955, 426, 974, 427, 1708, 4676, 428, 4141, 430, 3749, 431, 1619, 975, 4044, 3590, 1944, 4126, 1923, 1706, 432, 976, 977, 978, 4867, 4400, 433, 434, 1606, 2143, 979, 435, 980, 2604, 2895, 981, 436, 3448, 4959, 4563, 2188, 437, 438, 1692, 982, 2388, 2433, 2243, 983, 2035, 2120, 4940, 439, 440, 441, 2474, 442, 2052, 4764, 3862, 4055, 4358, 984, 2435, 4589, 2276, 2401, 985, 1664, 443, 2073, 2405, 986, 4309, 4045, 3854, 3682, 2491, 444, 445, 1972, 2688, 4366, 3425, 3231, 3649, 2759, 2724, 3873, 3755, 1216, 3599, 3775, 2754, 2606, 3471, 3234, 2565, 2803, 2562, 2684, 3411, 3405, 2690, 1255, 3694, 446, 3985, 3535, 1306, 4084, 3282, 447, 1353, 2168, 1780, 987, 988, 989, 2126, 448, 449, 2107, 450, 2031, 990, 451, 452, 991, 1485, 2242, 453, 2286, 992, 1728, 993, 4703, 994, 995, 454, 1696, 996, 2039, 455, 997, 998, 3116, 1869, 456, 4759, 2500, 4798, 2262, 4562, 457, 1386, 999, 458, 4768, 4982, 4778, 2040, 1000, 4981, 3879, 2698, 459, 460, 1001, 461, 1447, 462, 1002, 2042, 2339, 1003, 463, 464, 4425, 1645, 465, 1004, 467, 468, 469, 1231, 1468, 470, 471, 2496, 472, 473, 1005, 474, 475, 2108, 4725, 1006, 476, 1273, 1007, 1744, 1488, 1659, 477, 478, 4598, 1604, 4753, 2493, 479, 1008, 1009, 480, 1010, 1011, 1012, 1013, 1014, 481, 4313, 482, 483, 1499, 484, 1015, 4761, 2091, 2513, 1016, 4073, 1777, 2172, 485, 2205, 4592, 4545, 4720, 486, 1458, 4274, 2122, 4905, 5003, 4599, 4796, 2152, 4539, 4528, 4904, 4842, 4986, 4639, 4846, 4623, 4650, 4595, 2195, 4681, 2142, 487, 2182, 4710, 1775, 2083, 4205, 1526, 4586, 4602, 4518, 1697, 1017, 2000, 4692, 4795, 2480, 488, 2335, 489, 4969, 1894, 1882, 1817, 1880, 490, 1018, 3917, 3616, 4311, 1800, 4473, 4085, 4401, 1310, 3783, 3765, 1538, 3870, 491, 1948, 3699, 1735, 3792, 4290, 2074, 492, 2202, 5001, 2136, 493, 2211, 4532, 494, 2421, 495, 4090, 2378, 2104, 2210, 2247, 2478, 2047, 496, 4620, 4978, 4614, 1019, 2012, 1803, 3642, 497, 1322, 1020, 498, 1021, 2235, 2302, 2488, 4665, 4540, 5006, 499, 2049, 2404, 4685, 500, 501, 1022, 502, 1333, 503, 1023, 4686, 4804, 504, 4727, 505, 506, 4938, 4805, 2065, 1890, 4891, 1024, 507, 508, 509, 1025, 510, 1026, 3608, 1732, 511, 2397, 1864, 1816, 1531, 512, 513, 2451, 3636, 5012, 4892, 514, 1699, 4593, 1027, 4987, 515, 2495, 4660, 1028, 516, 1029, 2409, 1366, 2112, 2178, 2124, 2376, 5011, 4572, 4957, 4789, 4543, 4664, 4678, 2093, 4746, 2489, 4922, 2145, 1030, 4832, 4950, 1261, 4027, 3478, 3763, 2959, 1293, 2462, 517, 3197, 1595, 3413, 2238, 1031, 2228, 1448, 518, 2057, 2305, 2133, 2061, 4526, 4617, 1033, 2429, 2311, 1675, 4785, 1797, 519, 4578, 2271, 2466, 2148, 2420, 520, 4854, 2381, 2315, 2284, 4813, 521, 1034, 522, 523, 1999, 3759, 1215, 4122, 1730, 524, 525, 526, 3966, 4573, 5008, 1035, 527, 4973, 2508, 528, 3911, 529, 3289, 1821, 530, 531, 2426, 1036, 532, 1874, 533, 534, 1037, 535, 1038, 536, 1039, 537, 538, 539, 1040, 3767, 1929, 1041, 1042, 3683, 2100, 4853, 2300, 2165, 540, 541, 1043, 4906, 542, 1338, 2292, 2021, 1616, 1901, 1796, 1517, 4331, 4332, 4466, 2719, 3803, 4123, 4233, 1824, 3129, 3087, 3505, 4158, 4254, 1449, 2121, 1044, 3720, 4351, 4414, 1673, 3453, 3254, 2501, 1649, 543, 544, 545, 546, 1045, 547, 2084, 4240, 3580, 4680, 1046, 548, 2062, 1047, 550, 2598, 551, 552, 553, 3819, 1259, 4062, 1048, 554, 2841, 1049, 1050, 3515, 2219, 1433, 1323, 4301, 555, 556, 1051, 557, 558, 1052, 1053, 3738, 1567, 559, 1054, 1270, 3857, 1055, 2151, 560, 2175, 2089, 1056, 2198, 2193, 1257, 1238, 3662, 561, 2186, 1057, 4637, 562, 1058, 563, 4872, 2097, 564, 1059, 565, 566, 1060, 1061, 2231, 4203, 1899, 3981, 1062, 1303, 4116, 567, 1063, 568, 569, 570, 2367, 1946, 3620, 1064, 1514, 4002, 3679, 3964, 3707, 3666, 1348, 4273, 1804, 4497, 571, 1401, 4438, 1895, 1264, 572, 1912, 573, 3939, 4170, 4056, 1271, 1065, 1521, 1221, 1066, 1451, 1654, 1067, 3934, 4080, 4352, 574, 1700, 3739, 1565, 1419, 1811, 3950, 1690, 1397, 3716, 1569, 1465, 1437, 1674, 4337, 1285, 4268, 1183, 3726, 3881, 4134, 4347, 4012, 3938, 4066, 4198, 4416, 4164, 3630, 4229, 4292, 4193, 4325, 4375, 4371, 4432, 4215, 1753, 3944, 1409, 4195, 1729, 4223, 1540, 4455, 1068, 1069, 4512, 1723, 1070, 3750, 3633, 4070, 4104, 4162, 4235, 1863, 4346, 1881, 1814, 1572, 2418, 575, 4443, 3761, 1346, 1587, 1072, 3592, 576, 1891, 4469, 2430, 1275, 577, 1950, 1963, 4129, 1073, 1296, 1360, 1551, 3733, 4111, 3993, 4108, 3949, 1287, 1713, 1556, 1736, 1995, 1435, 1424, 1830, 1705, 1861, 1197, 1254, 4120, 1545, 4417, 1469, 1292, 2279, 1785, 1236, 4293, 1827, 3839, 3983, 4395, 1957, 2222, 578, 3928, 4295, 3715, 3855, 3609, 1990, 4076, 4175, 3927, 1757, 1650, 4299, 1773, 2004, 1267, 1364, 579, 1462, 1879, 4007, 3729, 3665, 3722, 1691, 1712, 1074, 1624, 1751, 1394, 3924, 3952, 580, 581, 2003, 1343, 2203, 1559, 1250, 1555, 2304, 582, 2395, 4114, 1818, 1075, 583, 1076, 1077, 1704, 4448, 584, 4882, 1078, 1079, 1786, 585, 3354, 1832, 586, 3432, 2891, 587, 588, 4583, 2505, 1903, 2077, 4936, 4658, 4830, 2446, 1080, 2278, 1081, 1082, 4459, 1083, 589, 1563, 1084, 2255, 2113, 590, 591, 1085, 2256, 592, 2308, 593, 594, 2274, 595, 4931, 2407, 1858, 596, 597, 598, 1453, 2559, 2590, 2738, 4478, 4069, 1809, 1327, 4150, 3260, 3481, 3672, 3625, 2008, 4439, 3852, 3997, 1411, 599, 3847, 4993, 1268, 4050, 3377, 4424, 1496, 4143, 4493, 3492, 1962, 1412, 2455, 600, 2457, 2321, 1086, 601, 4017, 4477, 1794, 2483, 4776, 2291, 602, 4263, 3072, 2009, 2199, 1754, 1087, 1088, 3888, 603, 604, 4777, 2324, 605, 1368, 3827, 4103, 606, 607, 1089, 2220, 4549, 1090, 1571, 1091, 1438, 608, 1092, 609, 610, 611, 1093, 612, 1094, 3701, 4389, 613, 4897, 1603, 614, 1095, 2154, 5000, 615, 616, 2263, 1332, 1715, 4369, 1652, 1096, 617, 1541, 618, 1921, 1733, 1373, 1870, 619, 4218, 1798, 2387, 1097, 1098, 1099, 1100, 620, 1702, 621, 622, 4801, 2398, 2239, 1101, 1667, 1384, 623, 4745, 3700, 1788, 1600, 624, 2098, 625, 4550, 4721, 4960, 4878, 2473, 4792, 4675, 1102, 1423, 626, 2771, 627, 1339, 3875, 628, 629, 3070, 4565, 2118, 4818, 4860, 2557, 2795, 2906, 2103, 4869, 2029, 3299, 3118, 4932, 4838, 4901, 2377, 4657, 4646, 4875, 4627, 4515, 4876, 4965, 4605, 4576, 2028, 4985, 4799, 4850, 1103, 4747, 1614, 1947, 2237, 630, 631, 4618, 4479, 3766, 632, 1104, 1105, 4886, 1106, 2432, 4827, 633, 1107, 4530, 634, 2371, 4651, 1108, 4536, 635, 1813, 636, 2431, 4866, 4991, 4814, 4560, 4956, 637, 4555, 1109, 4941, 4577, 2213, 638, 639, 3706, 1110, 640, 1111, 641, 4581, 4893, 4831, 2481, 4644, 4734, 2190, 4524, 4881, 4837, 4888, 4648, 642, 4548, 4807, 4896, 4868, 2374, 1112, 4823, 2164, 1113, 3735, 3390, 1694, 3431, 2838, 3483, 3464, 3848, 2558, 3314, 3086, 3029, 2956, 3517, 2651, 2914, 2680, 2632, 3121, 3100, 3528, 3526, 3084, 4220, 3304, 2846, 1186, 3235, 2903, 3559, 2687, 3409, 3237, 2900, 2999, 3349, 3171, 2752, 3262, 3504, 3047, 4376, 3193, 3430, 2525, 2670, 2911, 3508, 2776, 2697, 3200, 2790, 3323, 2543, 2874, 2614, 3904, 3373, 3054, 2617, 4242, 3621, 2708, 4179, 4398, 3959, 4935, 1269, 3095, 1286, 3624, 4481, 1432, 3511, 2735, 4381, 3295, 1585, 2390, 1568, 1114, 1766, 3221, 2643, 2739, 643, 4735, 4760, 1115, 4918, 4688, 3920, 644, 4723, 4949, 4748, 4607, 4719, 1116, 645, 646, 4611, 2353, 4645, 4998, 2307, 647, 1801, 4279, 3762, 1637, 1509, 4843, 4797, 4590, 4516, 4995, 4541, 2200, 4580, 4858, 648, 649, 2502, 1117, 4780, 4800, 4551, 4674, 1118, 1119, 2965, 2369, 2695, 3293, 650, 651, 4730, 4862, 4722, 4944, 1120, 652, 1121, 4983, 4784, 4877, 4643, 653, 654, 4909, 1122, 3264, 655, 2076, 4849, 656, 657, 2447, 658, 659, 2191, 4035, 2910, 3391, 2808, 3099, 2913, 3676, 2852, 3284, 2731, 1609, 2375, 2201, 3537, 3994, 1319, 4467, 1802, 1227, 1623, 660, 4844, 2086, 4770, 2192, 1123, 661, 2364, 662, 663, 664, 1124, 1125, 665, 2487, 4899, 2138, 1126, 666, 667, 4569, 4554, 4917, 2322, 1127, 1128, 1129, 668, 669, 1130, 670, 1131, 1527, 1132, 671, 1772, 2314, 1133, 1134, 2470, 1135, 672, 2236, 4716, 673, 4600, 2196, 674, 2456, 4606, 4910, 2123, 1136, 1137, 2358, 5005, 2208, 4952, 4945, 1933, 1731, 1793, 675, 676, 3342, 1138, 1139, 677, 4840, 4597, 4870, 1140, 4990, 4954, 4916, 678, 1141, 4737, 4527, 2253, 4531, 679, 1142, 1143, 680, 4771, 1144, 4638, 681, 4705, 4525, 4522, 4898, 2325, 2415, 5004, 1145, 682, 683, 1146, 684, 685, 2445, 686, 687, 4861, 2157, 688, 3822, 689, 690, 4743, 691, 1147, 1601, 692, 1148, 693, 4537, 4825, 4625, 4621, 3905, 694, 695, 1414, 1149, 696, 2027, 2159, 4756, 4793, 4575, 2160, 4828, 4731, 4718, 4802, 4750, 1150, 2081, 2258, 697, 1795, 1372, 1695, 1866, 1151, 4115, 1719, 2280, 4662, 698, 2176, 2194, 2217, 1920, 699, 700, 701, 4999, 1544, 4739, 2512, 702, 703, 4031, 4305, 1636, 1393, 2010, 3810, 4452, 3677, 4227, 1277, 1400, 4402, 4157, 4197, 1337, 1253, 1532, 4028, 3989, 2449, 4715, 704, 2050, 1493, 1854, 1902, 1510, 1152, 4824, 705, 2340, 4182, 706, 4652, 2442, 2484, 707, 708, 709, 4667, 1153, 2412, 4476, 2053, 710, 1375, 711, 712, 713, 4829, 4738, 4811, 4570, 4961, 1245, 714, 2045, 4707, 715, 2169, 4713, 4879, 1841, 4234, 4924, 1154, 1314, 4096, 2023, 716, 717, 4895, 2414, 718, 1155, 719, 720, 2063, 1311, 4921, 721, 4642, 722, 4885, 4666, 2249, 4217, 1156, 723, 1157, 1627, 2116, 4566, 2287, 1158, 2330, 4826, 4622, 4740, 724, 4700, 725, 1159, 5013, 4894, 726, 2434, 1953, 1160, 1201, 727, 3787, 2046, 1161, 728, 729, 2485, 2044, 4568, 3747, 730, 731, 2024, 1846, 2507, 2368, 2019, 2333, 3815, 2005, 2266, 1964, 2347, 2385, 732, 2177, 2059, 4958, 1822, 4815, 1262, 2094, 4480, 1537, 1291, 2419, 1318, 2283, 4976, 4294, 2486, 4926, 1582, 2162, 733, 4587, 734, 735, 3439, 2833, 4287, 4509, 4505, 4267, 3697, 3272, 4112, 2967, 3651, 1991, 1805, 1628, 3705, 2479, 736, 1195, 4863, 1163, 3859, 1164, 2394, 1165, 2355, 2351, 4679, 4835, 2259, 4839, 4571, 2275, 1166, 4968, 2250, 4912, 2423, 737, 1167, 4989, 4684, 4669, 4552, 4612, 2127, 1745, 1973, 4767, 1168, 2273, 2310, 3807, 4307, 1169, 2303, 1454, or 1781.

[0221] A VP capsid polypeptide may have a 581 to 589 region having a sequence of SEQ ID NO: 5014, wherein X⁶ of SEQ ID NO: 5014 is not E. In some embodiments, the 581 to 589 region has a sequence of any one of SEQ ID NOs: 2498, 4884, 738, 739, 4177, 1289, 740, 14, 15, 741, 742, 743, 16, 744, 17, 18, 745, 3477, 1548, 3051, 2982, 2171, 2877, 746, 19, 20, 3036, 3426, 3073, 3169, 747, 2406, 3362, 2784, 2469, 4889, 21, 3192, 4942, 22, 23, 1638, 748, 24, 25, 749, 26, 27, 1703, 1836, 28, 2038, 2301, 3660, 29, 750, 30, 31, 32, 2095, 1640, 33, 35, 36, 37, 4742, 2450, 38, 4925, 39, 751, 752, 2144, 1653, 1205, 3795, 753, 4288, 4219, 2770, 2962, 4241, 4107, 2718, 3317, 4391, 4053, 3263, 2553, 3947, 2710, 2608, 3467, 2796, 2961, 2529, 3320, 2674, 2635, 3446, 3053, 3250, 3688, 1182, 1998, 4320, 3351, 2655, 3514, 2779, 3194, 3319, 3224, 3281, 3708, 2807, 3562, 3274, 3374, 3013, 3416, 2981, 3065, 2777, 3469, 2977, 2638, 2972, 3059, 2574, 3380, 4262, 3167, 3368, 2781, 3547, 3386, 1225, 2960, 3485, 3370, 3443, 2824, 754, 1467, 3327, 3178, 3006, 3252, 2991, 3470, 2888, 2572, 3418, 2642, 2519, 3363, 40, 2633, 41, 42, 43, 755, 2511, 44, 45, 756, 46, 757, 47, 48, 1952, 758, 2341, 2410, 49, 3122, 2551, 3718, 4806, 2216, 3484, 3577, 759, 2080, 50, 1308, 1230, 3960, 1378, 2994, 3080, 2589, 3681, 51, 4694, 2257, 2167, 52, 760, 53, 2389, 4934, 4951, 4755, 761, 762, 4659, 54, 2146, 3925, 55, 3654, 2087, 2346, 4766, 4682, 4984, 4744, 56, 763, 764, 4626, 4702, 58, 59, 60, 61, 4086, 1740, 1660, 765, 766, 62, 1966, 2032, 2499, 2332, 767, 63, 2096, 2181, 4913, 2438, 2041, 64, 768, 769, 770, 2384, 2402, 771, 65, 66, 2111, 67, 772, 2458, 2197, 68, 3816, 69, 2599, 2706, 2497, 70, 2234, 2183, 2399, 71, 4769, 2366, 72, 73, 74, 3865, 1549, 1361, 2453, 3882, 773, 3713, 1942, 75, 1312, 4501, 76, 77, 774, 1413, 775, 776, 78, 1560, 4289, 3757, 79, 3593, 4043, 1806, 3908, 4397, 1615, 4415, 3723, 2006, 3754, 1470, 4360, 80, 3945, 2854, 3523, 3669, 1356, 777, 2132, 2379, 82, 4065, 83, 84, 2030, 1294, 2413, 2064, 1484, 2299, 85, 4594, 86, 778, 87, 3891, 4456, 4040, 4496, 1982, 2001, 1478, 1189, 88, 1490, 1885, 1926, 89, 90, 91, 779, 2270, 780, 2161, 1180, 92, 781, 782, 783, 93, 2356, 784, 785, 786, 94, 95, 787, 788, 1831, 1867, 96, 4458, 97, 1970, 4656, 2173, 1936, 2349, 1590, 4585, 98, 99, 100, 789, 790, 1298, 101, 1688, 791, 792, 2007, 2070, 102, 793, 4632, 103, 794, 795, 104, 105, 106, 2229, 796, 4980, 4691, 107, 2440, 1849, 108, 2014, 797, 4736, 2509, 2018, 2227, 4787, 109, 1579, 110, 1906, 111, 2428, 798, 112, 2411, 113, 2359, 799, 4848, 800, 2461, 1444, 2313, 2350, 4579, 4821, 801, 114, 2329, 4864, 4834, 115, 1344, 116, 802, 117, 118, 119, 4929, 4677, 120, 4791, 2158, 121, 803, 804, 1463, 805, 122, 2139, 2290, 1760, 2465, 2424, 2058, 2230, 124, 4717, 806, 125, 126, 2370, 127, 4521, 128, 4971, 4994, 807, 2085, 129, 130, 131, 132, 4933, 808, 2336, 2026, 2204, 809, 810, 2281, 133, 1978, 134, 811, 812, 135, 136, 137, 138, 813, 814, 139, 4673, 140, 815, 1326, 141, 142, 143, 2344, 4544, 144, 145, 816, 4654, 2125, 4663, 4810, 4816, 1634, 1302, 817, 146, 818, 147, 148, 149, 4546, 150, 151, 152, 153, 154, 155, 819, 820, 156, 2149, 157, 2295, 821, 158, 159, 160, 161, 4631, 2441, 162, 163, 164, 165, 166, 822, 167, 168, 169, 170, 171, 823, 172, 4613, 824, 1651, 173, 1483, 174, 175, 825, 176, 177, 178, 179, 4624, 2170, 4809, 4520, 180, 826, 827, 181, 828, 4695, 2130, 4911, 182, 4582, 4873, 4596, 2020, 2189, 183, 4641, 829, 184, 185, 2244, 4647, 186, 187, 188, 189, 190, 2114, 830, 191, 192, 193, 194, 2071, 4615, 2361, 195, 4852, 2187, 4914, 4947, 196, 1391, 197, 4534, 4726, 4788, 198, 199, 4920, 831, 2240, 2223, 200, 201, 202, 203, 2106, 2503, 4775, 204, 205, 832, 833, 206, 834, 2232, 2294, 207, 2166, 208, 209, 210, 835, 836, 1334, 837, 3901, 3312, 2649, 1301, 211, 212, 1450, 4386, 3028, 213, 1446, 214, 2206, 215, 1896, 1522, 3490, 838, 216, 2090, 2241, 217, 218, 4653, 219, 1612, 220, 221, 222, 839, 223, 4953, 4974, 4790, 4915, 2464, 4567, 4774, 4964, 2360, 840, 224, 4928, 4741, 225, 2088, 4751, 5007, 4542, 226, 227, 4890, 4519, 4883, 228, 4786, 229, 230, 231, 2393, 2448, 841, 842, 232, 233, 4782, 234, 4962, 2269, 843, 235, 844, 236, 237, 4930, 845, 846, 238, 847, 4704, 239, 848, 849, 2150, 850, 851, 852, 853, 1536, 240, 854, 241, 242, 243, 244, 245, 246, 247, 248, 4923, 2245, 4696, 855, 4634, 856, 249, 250, 251, 252, 253, 254, 255, 857, 2115, 4880, 256, 257, 258, 259, 858, 859, 260, 261, 860, 861, 862, 262, 4966, 863, 864, 263, 4749, 4970, 2296, 2318, 4535, 865, 2326, 264, 1241, 265, 266, 866, 1477, 267, 867, 4977, 268, 868, 269, 4668, 5002, 270, 869, 870, 271, 871, 872, 272, 4822, 4709, 873, 4655, 4972, 2392, 2317, 874, 1252, 273, 1591, 4975, 875, 274, 2025, 275, 1980, 276, 876, 877, 2066, 277, 278, 279, 4670, 280, 2323, 2288, 2334, 4689, 281, 878, 2416, 1892, 879, 1539, 2214, 2215, 880, 2327, 881, 882, 4601, 883, 1295, 3601, 3877, 1930, 1420, 1678, 1460, 2306, 884, 282, 1799, 283, 284, 4988, 4871, 4553, 4772, 4817, 2260, 285, 1626, 2082, 885, 286, 1374, 886, 2119, 2504, 2468, 287, 1620, 1290, 2425, 2482, 4671, 2282, 288, 2354, 1354, 2033, 289, 887, 290, 888, 291, 1956, 2467, 889, 2357, 4547, 4765, 292, 4794, 2391, 4324, 890, 294, 295, 4138, 891, 2297, 296, 2224, 3903, 297, 892, 3829, 298, 299, 3809, 4271, 3844, 1436, 300, 1515, 1617, 4701, 2174, 301, 1961, 4649, 5010, 302, 2060, 303, 304, 305, 2452, 2147, 4574, 4538, 306, 2293, 1589, 893, 4946, 4370, 4841, 2342, 307, 308, 309, 894, 2246, 2155, 3646, 4059, 1431, 1331, 310, 311, 4836, 4948, 312, 895, 1779, 313, 314, 315, 316, 896, 1558, 1552, 317, 2312, 318, 319, 897, 320, 898, 321, 322, 899, 1958, 2022, 2016, 900, 2454, 323, 2427, 2134, 324, 901, 325, 902, 326, 2373, 4803, 2459, 1491, 327, 328, 903, 2463, 2264, 329, 330, 904, 1635, 4820, 905, 2506, 331, 4706, 2092, 4484, 1756, 906, 907, 4661, 2179, 4584, 332, 4907, 4635, 4529, 4683, 4523, 4561, 333, 2337, 3536, 2701, 2799, 3332, 3294, 3159, 3069, 2637, 3025, 2782, 3247, 3350, 2692, 2586, 3004, 3049, 2694, 2650, 3554, 2983, 3403, 3214, 3163, 2541, 3090, 3097, 3462, 1430, 2941, 3486, 2842, 3558, 3104, 3037, 3419, 2780, 2931, 1276, 2928, 2609, 3068, 3128, 2548, 2538, 2618, 2789, 3228, 2657, 3189, 2128, 2863, 3307, 3300, 2546, 3048, 3543, 2946, 2975, 3346, 3067, 2728, 2955, 3408, 3027, 3094, 3203, 2988, 2751, 2953, 2566, 2578, 2823, 3063, 3335, 3000, 3181, 3011, 3138, 3389, 2805, 3074, 2894, 3149, 2560, 3417, 3265, 3378, 2901, 2837, 2822, 2745, 3473, 3530, 3040, 2597, 3509, 3522, 3161, 2926, 3209, 3105, 3400, 2630, 2905, 2671, 2818, 2806, 2702, 2709, 2400, 3549, 3538, 2534, 2773, 2623, 3491, 3243, 3136, 2693, 3164, 3343, 2918, 2555, 2794, 2679, 3510, 3110, 2672, 3442, 2929, 3184, 3488, 2135, 4763, 3414, 3093, 2996, 3141, 3544, 3102, 2856, 2957, 3466, 3461, 2788, 2660, 3344, 3204, 2720, 3379, 2826, 1789, 2396, 2785, 3249, 3527, 4460, 3352, 2051, 2569, 4457, 2011, 4857, 2163, 4783, 4319, 3906, 1533, 1755, 1888, 4248, 1557, 2153, 3804, 1363, 1934, 1602, 1404, 4188, 1330, 4349, 3337, 3533, 2629, 3038, 2539, 3567, 3291, 3348, 3115, 3359, 2993, 3079, 3506, 2527, 2963, 2938, 2516, 3113, 1345, 2639, 3143, 3044, 2747, 3154, 3280, 3039, 2743, 2902, 3056, 2554, 2522, 3103, 3210, 3434, 2656, 4251, 4166, 4196, 3206, 3328, 2588, 3553, 2714, 3078, 3222, 3137, 3357, 2717, 2944, 3012, 3220, 3202, 2811, 3083, 3269, 3566, 2699, 2515, 3023, 2533, 3288, 3075, 3005, 2685, 3058, 2976, 2622, 3333, 3463, 2939, 3521, 3268, 3117, 2626, 2616, 3240, 2570, 3565, 2919, 3157, 2849, 3444, 2631, 3420, 2659, 3325, 3186, 2920, 3258, 3440, 3457, 3310, 2761, 3134, 2621, 3531, 2711, 2774, 2867, 2585, 3155, 2620, 3156, 2844, 3126, 3160, 2909, 3542, 3225, 2887, 3474, 3218, 2744, 2896, 3135, 3424, 3498, 3529, 2661, 2667, 2549, 2819, 2768, 2935, 3182, 2772, 3230, 3043, 2922, 3581, 3524, 2869, 2610, 3298, 2775, 3108, 2603, 3614, 2612, 2860, 3187, 3238, 3786, 4385, 3016, 3436, 2876, 2987, 3532, 3438, 3561, 3259, 2663, 2890, 3433, 3071, 3018, 2580, 2755, 3015, 2540, 3398, 2664, 2583, 2830, 2644, 2641, 3513, 2725, 2723, 3338, 3556, 2866, 2514, 2932, 2753, 2862, 2899, 2605, 2989, 3096, 3124, 2985, 2716, 3145, 3017, 2591, 2640, 3033, 1853, 3216, 3316, 3412, 2971, 3256, 3153, 3575, 3339, 2915, 2531, 3552, 3475, 3060, 3375, 2756, 3382, 2847, 2859, 3251, 3702, 3423, 2537, 2801, 3076, 2696, 3092, 3459, 3144, 3441, 2802, 3479, 2907, 3512, 3518, 3021, 2871, 3032, 2647, 2945, 3045, 2763, 3313, 3034, 3315, 3541, 2746, 2669, 2524, 3003, 2732, 3166, 3046, 3306, 2873, 3364, 3253, 3215, 3061, 2804, 2722, 2964, 2990, 2836, 4098, 4449, 3173, 2762, 3737, 2628, 3507, 2564, 3031, 2872, 3360, 2658, 2930, 2904, 3244, 3217, 3311, 3445, 2840, 3372, 2958, 3098, 3356, 3456, 3388, 2624, 3207, 2576, 2742, 2665, 2815, 3052, 3421, 2593, 3242, 2535, 2966, 2898, 2858, 2943, 2668, 2798, 3196, 2528, 2713, 3001, 2691, 2948, 2767, 2544, 3302, 2734, 2893, 2592, 2861, 3502, 2969, 2582, 3229, 2676, 2545, 3255, 3330, 2547, 3257, 2882, 3151, 3088, 2883, 3318, 2645, 2733, 2587, 3500, 3008, 2715, 2845, 3183, 2654, 3233, 3267, 2741, 2827, 2704, 3091, 2832, 2736, 3177, 3271, 2835, 2908, 3176, 2947, 3292, 3191, 2517, 3026, 3082, 3392, 3381, 2584, 2712, 3213, 3451, 2634, 3150, 2810, 3303, 2573, 3460, 2615, 3394, 2828, 3329, 4377, 4499, 3555, 2974, 3782, 3629, 3578, 3885, 2817, 3248, 2954, 3334, 3571, 3345, 3551, 3384, 3422, 1357, 1844, 2530, 2973, 4418, 4081, 3951, 1764, 1671, 1852, 334, 1843, 3449, 3185, 3399, 2786, 3055, 3472, 3397, 2601, 3564, 3277, 4373, 3548, 3179, 3407, 3841, 3347, 3142, 4255, 4431, 3241, 3077, 2700, 3147, 2648, 3283, 2829, 3278, 2581, 2536, 4363, 2848, 3410, 2797, 2523, 2520, 2721, 3496, 2571, 3198, 3219, 3030, 2673, 2921, 3837, 3301, 3322, 2705, 3239, 2949, 3369, 3396, 2892, 2897, 2766, 3174, 3297, 2550, 2889, 2933, 2793, 2627, 2677, 3119, 2596, 3226, 3172, 3089, 2868, 2839, 3942, 3120, 3286, 2843, 3465, 1564, 3946, 4222, 1504, 3999, 2682, 1875, 2865, 3539, 3168, 2864, 3308, 3557, 2940, 3109, 3503, 2625, 3455, 3114, 2595, 3331, 2978, 2518, 2521, 4079, 3024, 3573, 2952, 2653, 1769, 3180, 2813, 2652, 2600, 2816, 3201, 3188, 3270, 2997, 2992, 3009, 3520, 2936, 3275, 3165, 3447, 3131, 3305, 2809, 2792, 2729, 2814, 2619, 3266, 2825, 3066, 2857, 2998, 3064, 2681, 3035, 3279, 2764, 3480, 3127, 2912, 3010, 2607, 3211, 3111, 3041, 1573, 3909, 4269, 3487, 3489, 3019, 335, 1266, 1415, 2980, 3428, 2444, 3435, 3482, 3020, 2748, 2646, 2787, 2760, 2563, 3085, 3133, 3158, 3170, 2703, 3494, 2556, 2552, 3395, 3245, 3404, 2675, 2791, 2252, 4845, 1911, 4856, 908, 1935, 4711, 4728, 2460, 4517, 2749, 3341, 3355, 2575, 2942, 2886, 2758, 2594, 3495, 2884, 3516, 3042, 2737, 2923, 3563, 2855, 3476, 2611, 2937, 3383, 3497, 3402, 3162, 2662, 2875, 3223, 2878, 2079, 1808, 3285, 2757, 3057, 2951, 3519, 2579, 2853, 3387, 3401, 3493, 3393, 1608, 3365, 2885, 3574, 3081, 3007, 3568, 3152, 3367, 3358, 336, 2268, 3468, 3290, 3550, 3132, 2726, 2879, 3190, 3309, 2613, 2765, 3106, 1355, 3454, 2851, 2881, 3232, 3458, 3326, 3353, 2927, 3212, 2950, 3376, 3208, 3062, 3612, 3195, 3385, 2686, 2602, 3569, 3123, 2727, 1622, 2821, 2636, 2750, 2850, 3050, 2925, 3336, 3540, 2689, 3139, 2526, 3361, 3022, 3427, 3107, 3140, 3371, 3276, 2831, 3501, 2924, 3366, 3199, 3101, 3321, 3499, 2917, 2683, 2800, 2812, 3340, 3227, 3148, 3657, 4446, 1746, 1464, 1886, 2666, 3246, 3130, 3560, 3236, 2730, 3572, 1607, 3689, 2968, 1457, 1500, 909, 337, 1184, 3450, 2577, 2567, 2532, 3415, 2934, 2984, 2568, 4147, 4943, 3002, 2986, 910, 2979, 2542, 2331, 2492, 1762, 4472, 1472, 1529, 2319, 2131, 4057, 2048, 4887, 1976, 4507, 1583, 338, 2078, 2372, 2102, 339, 911, 1711, 340, 912, 2013, 913, 2277, 914, 341, 915, 4672, 4902, 916, 342, 1594, 4440, 917, 343, 344, 4559, 918, 2233, 2439, 919, 345, 920, 346, 921, 922, 347, 2226, 348, 2180, 2298, 349, 350, 2099, 2036, 351, 4808, 923, 924, 4498, 1518, 3728, 3637, 3570, 3429, 4091, 2870, 2995, 4338, 3205, 2880, 3261, 1994, 3968, 4291, 4204, 4071, 4034, 1742, 2820, 3912, 3287, 1218, 1190, 4145, 353, 2422, 354, 355, 925, 1782, 2184, 2261, 2490, 926, 927, 928, 4630, 2137, 3610, 356, 357, 4729, 358, 359, 4224, 1918, 1959, 1840, 3736, 2471, 1770, 929, 930, 931, 4155, 360, 361, 362, 932, 363, 364, 1279, 2289, 365, 1543, 366, 2156, 2472, 367, 4049, 1633, 1722, 368, 369, 1495, 1566, 370, 4967, 372, 373, 1211, 1873, 2101, 2494, 1726, 374, 1442, 933, 1748, 4142, 1434, 1358, 1191, 3732, 4110, 4039, 4411, 4506, 4270, 4156, 3780, 4036, 4030, 4016, 1550, 3899, 1247, 1855, 1181, 3919, 1639, 3664, 1244, 4140, 3930, 4117, 4189, 4001, 3799, 3643, 3619, 1240, 1686, 1479, 1307, 1575, 4296, 1665, 3871, 4135, 1605, 4408, 3604, 1274, 4149, 1313, 3741, 1938, 3709, 1727, 3893, 1280, 3622, 1784, 3834, 1752, 1983, 1743, 3979, 4461, 4113, 3817, 4232, 1340, 1489, 4214, 3902, 1857, 2316, 1904, 1219, 1486, 1512, 1481, 1516, 3820, 3789, 4252, 4047, 4330, 4082, 4094, 1574, 1248, 4078, 1872, 1426, 3785, 3687, 4318, 4243, 3866, 3704, 4172, 1621, 4315, 1192, 1513, 1856, 3324, 2769, 2678, 1561, 3296, 375, 2343, 2348, 376, 377, 1395, 1584, 4093, 4453, 3940, 3778, 4374, 4210, 4009, 4264, 4339, 4368, 1738, 378, 1610, 4194, 4474, 4013, 4266, 1771, 1759, 1922, 3860, 3832, 1349, 1381, 3663, 1642, 1185, 4356, 3932, 1233, 4212, 3858, 1198, 4192, 3611, 1919, 1819, 3790, 3712, 1969, 4095, 1887, 4468, 1720, 4247, 934, 1790, 2002, 1657, 1663, 1336, 3894, 1554, 1494, 1405, 3576, 4314, 3695, 1851, 1850, 4362, 1815, 3845, 4511, 3656, 3638, 1406, 1596, 4454, 1443, 1661, 935, 4504, 1359, 1734, 3650, 1910, 1305, 1648, 3831, 4435, 1208, 1988, 4451, 1993, 1986, 3849, 1718, 4068, 1835, 1425, 1428, 1282, 4380, 1658, 1452, 1687, 4024, 379, 4072, 3791, 4491, 4323, 4014, 1304, 1440, 1511, 1981, 1676, 1547, 4422, 1283, 3861, 1383, 3644, 3691, 4259, 1749, 1418, 1176, 4216, 1924, 1421, 1387, 3992, 4423, 4253, 1618, 1871, 1256, 3748, 4119, 1297, 1586, 1251, 1299, 1954, 4450, 3990, 4029, 4097, 3890, 3796, 1389, 3711, 4344, 1578, 1476, 4343, 1202, 4413, 4384, 3808, 1647, 1475, 3892, 3674, 1739, 3926, 3595, 1943, 3756, 4405, 3973, 4109, 4159, 3744, 4387, 1960, 4275, 3781, 1535, 1210, 4492, 4365, 4118, 3655, 3886, 4278, 4383, 4485, 1392, 3751, 3931, 3986, 3678, 1249, 4353, 4208, 3710, 4238, 4213, 3969, 4436, 3175, 4128, 2970, 1228, 3534, 3437, 3406, 3641, 3639, 3954, 4335, 3995, 3582, 4475, 3784, 4470, 4010, 3802, 3941, 4427, 4396, 4348, 3587, 3818, 3864, 3956, 3863, 3731, 3814, 4067, 4354, 4350, 4334, 3821, 1932, 3929, 4171, 1258, 3824, 3631, 4465, 4494, 1320, 1398, 3828, 1204, 1223, 1284, 1685, 3773, 4209, 3014, 4462, 4246, 4190, 4312, 4023, 3760, 3753, 1178, 3884, 2783, 4038, 3545, 2916, 3112, 2834, 3880, 3673, 4102, 4399, 4048, 3752, 4207, 1235, 3943, 4355, 4087, 4100, 4327, 4037, 4163, 3918, 4486, 1243, 3933, 4178, 1662, 1643, 4152, 3634, 3617, 4445, 4303, 1370, 3838, 4199, 4284, 1213, 4382, 1399, 1187, 3714, 1828, 4487, 3615, 1842, 1501, 3746, 4018, 4420, 3606, 4121, 3724, 3935, 4419, 4282, 1955, 1949, 4310, 4488, 1577, 4127, 1288, 1171, 3670, 4052, 3627, 3777, 936, 1371, 3685, 1325, 1940, 380, 4482, 4258, 3812, 1581, 1860, 4124, 4508, 4500, 3652, 3972, 1309, 1630, 1528, 3717, 1217, 3692, 4430, 3764, 4316, 4285, 3645, 3971, 4421, 1172, 4026, 2740, 3125, 3546, 1725, 1206, 3842, 4404, 3690, 3962, 4513, 4340, 4329, 4410, 3703, 4136, 1763, 1487, 3589, 3907, 4153, 2707, 3730, 4426, 4180, 4041, 3923, 4444, 3851, 4429, 4361, 1441, 4394, 4302, 3758, 4510, 3742, 1868, 4077, 1710, 1939, 1335, 1666, 1407, 4187, 1193, 1188, 1196, 1724, 1717, 1200, 1646, 1997, 1975, 1701, 4280, 1613, 4006, 1984, 1351, 3653, 3833, 1593, 2561, 4442, 3900, 4298, 1761, 4388, 1820, 1597, 4317, 4249, 1341, 1203, 1680, 4441, 3628, 3725, 1945, 937, 4206, 1588, 1439, 3794, 4447, 1838, 3776, 3658, 4064, 1377, 4011, 4272, 4503, 1324, 1367, 3594, 3680, 1300, 1750, 938, 3913, 3774, 1877, 1987, 1862, 3998, 1380, 4185, 3686, 3696, 4463, 1350, 4008, 4230, 3853, 4244, 4083, 381, 1909, 3897, 1546, 382, 3613, 3273, 3452, 3525, 1229, 4105, 3835, 383, 1263, 1234, 3970, 1492, 3856, 3586, 1175, 4321, 4020, 4144, 1224, 1199, 3667, 2778, 4412, 4407, 1812, 1810, 3823, 1416, 1427, 1507, 1878, 4333, 3146, 4281, 4211, 1179, 3843, 1669, 1677, 1524, 1525, 1974, 384, 1979, 1456, 1239, 4167, 3740, 1876, 1388, 1967, 1474, 385, 1342, 1471, 4176, 1232, 1989, 4125, 1741, 1508, 1580, 4060, 4378, 1576, 1212, 1893, 3921, 3585, 1174, 1396, 4061, 4015, 1207, 3698, 3825, 3922, 4021, 4181, 1598, 1916, 1429, 4502, 4231, 1321, 4390, 3693, 3734, 1382, 3684, 1747, 3806, 3896, 3635, 1768, 4025, 3976, 3840, 3963, 4286, 1502, 3836, 4161, 3659, 3743, 4130, 3605, 1385, 1783, 4392, 4328, 1316, 4173, 4265, 1246, 1985, 1629, 1829, 1737, 3826, 1473, 1992, 1883, 1656, 1837, 1914, 1839, 1834, 3984, 4495, 3910, 4160, 3671, 4184, 4132, 4250, 1503, 1237, 1523, 1417, 4063, 1562, 3977, 1971, 1707, 1847, 1792, 3769, 4074, 1534, 4239, 4003, 3915, 1689, 1776, 1599, 1265, 1410, 1823, 1498, 1329, 939, 386, 940, 1655, 3874, 4261, 3626, 1791, 3579, 1644, 3936, 4054, 4260, 4359, 4131, 4297, 4357, 4022, 3770, 4046, 1222, 1996, 3788, 4169, 1925, 3953, 4228, 4226, 4277, 4101, 1889, 1369, 3797, 4088, 4019, 3771, 3632, 1402, 388, 1520, 1767, 1466, 1194, 4137, 1908, 1927, 1758, 3772, 3661, 4186, 4174, 1170, 3850, 1315, 1611, 1530, 1859, 2209, 4183, 1408, 1403, 941, 4033, 3623, 3596, 1461, 1848, 1173, 1928, 1459, 1765, 1826, 3719, 1931, 3584, 4004, 3591, 3967, 4168, 3957, 3878, 4165, 4191, 3980, 4058, 4200, 4336, 3958, 1260, 4051, 3798, 4032, 1774, 4322, 3991, 4106, 1641, 1570, 3978, 3965, 4464, 3813, 4154, 1365, 4257, 3846, 4345, 4379, 3603, 1693, 3937, 3801, 1787, 1214, 4483, 4201, 1898, 1845, 1226, 1220, 4245, 1347, 3867, 1900, 3640, 3916, 4089, 1209, 3745, 3988, 3975, 4236, 4075, 4146, 4256, 4308, 4000, 4148, 3588, 3868, 4403, 3883, 4326, 4393, 3895, 4237, 3955, 3727, 4005, 4092, 4372, 4283, 1553, 3805, 4151, 1281, 1681, 4489, 3982, 4437, 3597, 4342, 3872, 3987, 4490, 3876, 3668, 4300, 1679, 1242, 3598, 3583, 3647, 389, 4304, 3793, 3779, 1937, 1907, 4042, 3648, 3996, 3800, 4367, 4099, 1807, 3887, 4428, 1625, 1390, 1884, 1682, 4364, 4306, 3869, 1278, 1672, 942, 1505, 1542, 1709, 1915, 3600, 3914, 1968, 3948, 1670, 3811, 1865, 1362, 943, 1716, 3961, 1506, 4221, 1376, 944, 1683, 4276, 1445, 1721, 1632, 3607, 1328, 1455, 1913, 1497, 1317, 1951, 1778, 1379, 3768, 4225, 1668, 2383, 945, 390, 391, 4406, 4341, 1480, 392, 393, 394, 395, 1714, 1422, 396, 2043, 946, 2265, 397, 3618, 4433, 1177, 3898, 398, 2251, 947, 948, 2212, 949, 950, 399, 951, 400, 1965, 4640, 2129, 2345, 4471, 952, 953, 401, 402, 2475, 403, 404, 4758, 955, 2437, 4139, 1482, 3602, 4434, 3721, 1592, 1825, 1698, 1519, 1352, 4202, 4409, 1977, 1917, 405, 406, 407, 408, 956, 2272, 957, 2267, 1631, 1684, 409, 2054, 3889, 958, 410, 2117, 411, 959, 412, 960, 2443, 4712, 4619, 2285, 413, 414, 415, 961, 2352, 2417, 962, 1905, 416, 963, 417, 418, 2382, 3675, 1833, 3974, 419, 964, 421, 965, 966, 967, 4919, 968, 2365, 969, 970, 422, 1897, 2056, 2309, 4733, 1272, 4754, 2207, 971, 423, 4133, 3830, 4865, 972, 424, 973, 425, 2068, 4955, 426, 974, 2109, 2380, 427, 1708, 4676, 428, 4141, 429, 430, 3749, 431, 1619, 975, 4044, 3590, 1944, 4126, 1923, 1706, 432, 976, 977, 978, 4867, 4400, 433, 434, 1606, 2143, 979, 435, 980, 2604, 2895, 981, 436, 3448, 4959, 2188, 437, 438, 2055, 1692, 982, 2388, 2433, 2243, 983, 2035, 2120, 4940, 439, 440, 2474, 442, 4900, 2052, 4764, 3862, 4055, 4358, 984, 2435, 4589, 2276, 2401, 985, 1664, 443, 2073, 2405, 986, 4309, 4045, 3854, 3682, 2491, 444, 445, 1972, 2688, 4366, 3425, 3231, 3649, 2759, 2724, 3873, 3755, 1216, 3599, 3775, 2754, 2606, 3471, 3234, 2565, 2803, 2562, 2684, 3411, 3405, 2690, 1255, 3694, 446, 3985, 3535, 1306, 4084, 3282, 447, 1353, 2168, 1780, 987, 988, 989, 2126, 448, 449, 2107, 450, 2031, 990, 451, 452, 991, 1485, 453, 992, 1728, 993, 4703, 994, 995, 454, 1696, 996, 2039, 455, 997, 4874, 998, 3116, 1869, 456, 4759, 2500, 4798, 2262, 4562, 457, 1386, 999, 458, 4768, 4982, 4778, 2040, 1000, 4981, 3879, 2698, 459, 460, 1001, 461, 1447, 462, 1002, 2042, 2339, 1003, 463, 464, 4425, 1645, 465, 1004, 466, 2328, 467, 468, 469, 1231, 1468, 470, 471, 2496, 472, 473, 1005, 474, 475, 2108, 4725, 476, 1273, 1007, 1744, 1488, 1659, 477, 478, 4598, 1604, 4753, 2493, 479, 1008, 1009, 480, 1011, 1012, 1013, 1014, 481, 4313, 482, 483, 1499, 484, 1015, 4761, 2091, 2386, 2513, 1016, 4073, 1777, 2172, 485, 2205, 4592, 4545, 486, 1458, 4274, 2122, 4905, 5003, 4599, 4796, 2152, 4539, 4528, 4904, 4842, 4986, 4846, 4650, 4595, 2195, 4681, 2142, 487, 4710, 1775, 4205, 1526, 4586, 4602, 4518, 1697, 1017, 2000, 4692, 4795, 2480, 2017, 488, 2335, 489, 4969, 1894, 1882, 1817, 1880, 490, 1018, 3917, 3616, 4311, 1800, 4473, 4085, 4401, 1310, 3783, 3765, 1538, 3870, 491, 1948, 3699, 1735, 3792, 4290, 2074, 492, 2202, 5001, 2136, 493, 2211, 4532, 494, 2421, 495, 4090, 2378, 2104, 2210, 2247, 2478, 2047, 496, 4620, 4978, 4614, 1019, 2012, 1803, 3642, 497, 1322, 4752, 1020, 498, 1021, 2235, 2302, 2488, 4665, 4540, 5006, 4699, 4608, 4781, 499, 2049, 4685, 500, 501, 1022, 502, 1333, 503, 1023, 4686, 4804, 504, 4727, 505, 506, 4938, 4805, 2065, 1890, 4891, 1024, 507, 508, 509, 2110, 1025, 510, 1026, 3608, 1732, 511, 2397, 1864, 1816, 1531, 512, 513, 2451, 3636, 5012, 4892, 514, 1699, 4593, 1027, 4987, 515, 2495, 4660, 1028, 516, 1029, 2409, 1366, 2112, 2178, 2124, 2376, 5011, 4572, 4957, 4789, 4543, 4664, 4678, 2093, 4746, 2489, 4922, 2145, 1030, 4832, 4950, 1261, 4027, 3478, 3763, 2959, 1293, 2462, 517, 3197, 1595, 3413, 2238, 2067, 1031, 2228, 518, 4698, 4616, 2057, 2305, 2133, 2061, 4526, 4617, 1032, 1033, 2429, 2311, 1675, 4785, 1797, 519, 4578, 2271, 4693, 4604, 2466, 2148, 2420, 520, 4854, 2381, 2315, 2284, 4813, 521, 1034, 522, 523, 1999, 3759, 1215, 4122, 1730, 524, 525, 526, 3966, 4573, 5008, 1035, 527, 4973, 2508, 528, 3911, 529, 3289, 1821, 530, 531, 2426, 1036, 532, 1874, 533, 534, 1037, 535, 1038, 536, 1039, 537, 538, 539, 1040, 3767, 1929, 1042, 3683, 2100, 4853, 2300, 2165, 540, 2105, 541, 1043, 4906, 542, 1338, 2292, 2021, 1616, 1901, 1796, 1517, 4331, 4332, 4466, 2719, 3803, 4123, 4233, 1824, 3129, 3087, 3505, 4158, 4254, 1449, 1044, 3720, 4351, 4414, 1673, 3453, 3254, 2501, 1649, 543, 544, 545, 546, 1045, 547, 4240, 3580, 4680, 1046, 548, 2062, 549, 1047, 550, 2598, 551, 552, 553, 3819, 1259, 4062, 1048, 554, 2841, 1049, 1050, 3515, 2219, 1433, 1323, 4301, 555, 556, 1051, 557, 558, 1052, 1053, 3738, 1567, 559, 1054, 1270, 3857, 1055, 2151, 560, 2175, 2089, 1056, 4514, 2198, 2193, 1257, 1238, 3662, 561, 2186, 1057, 4637, 562, 1058, 563, 4872, 2097, 2436, 564, 1059, 565, 566, 1060, 1061, 2231, 4203, 1899, 3981, 1062, 1303, 4116, 567, 1063, 568, 569, 570, 2367, 1946, 3620, 1064, 1514, 4002, 3679, 3964, 3707, 3666, 1348, 4273, 1804, 4497, 571, 1401, 4438, 1895, 1264, 572, 1912, 573, 3939, 4170, 4056, 1271, 1065, 1521, 1221, 1066, 1451, 1654, 1067, 3934, 4080, 4352, 574, 1700, 3739, 1565, 1419, 1811, 3950, 1690, 1397, 3716, 1569, 1465, 1437, 1674, 4337, 1285, 4268, 1183, 3726, 3881, 4134, 4347, 4012, 3938, 4066, 4198, 4416, 4164, 3630, 4229, 4292, 4193, 4325, 4375, 4371, 4432, 4215, 1753, 3944, 1409, 4195, 1729, 4223, 1540, 4455, 1068, 1069, 4512, 1723, 1070, 3750, 3633, 4070, 4104, 4162, 4235, 1863, 4346, 1881, 1071, 1814, 1572, 2418, 575, 4443, 3761, 1346, 1587, 1072, 3592, 576, 1891, 4469, 2430, 1275, 577, 1950, 1963, 4129, 1073, 1296, 1360, 1551, 3733, 4111, 3993, 4108, 3949, 1287, 1713, 1556, 1736, 1995, 1435, 1424, 1830, 1705, 1861, 1197, 1254, 4120, 1545, 4417, 1469, 1292, 2185, 2279, 1785, 1236, 4293, 1827, 3839, 3983, 4395, 1957, 2222, 578, 3928, 4295, 3715, 3855, 3609, 1990, 4076, 4175, 3927, 1757, 1650, 4299, 1773, 2004, 1267, 1364, 579, 1462, 1879, 4007, 3729, 3665, 3722, 1691, 1712, 1074, 1624, 1751, 1394, 3924, 3952, 580, 581, 2003, 1343, 2203, 1559, 1250, 1555, 582, 2395, 4114, 1818, 1075, 583, 1076, 1077, 1704, 4448, 584, 4882, 1078, 1079, 1786, 585, 3354, 1832, 586, 3432, 2891, 587, 588, 4583, 2505, 1903, 2077, 4936, 4658, 4830, 2446, 1080, 2278, 1081, 1082, 4459, 1083, 589, 1563, 1084, 2255, 2113, 590, 591, 1085, 592, 2308, 593, 594, 2274, 595, 4931, 2407, 1858, 596, 597, 598, 1453, 2559, 2590, 2738, 4478, 4069, 1809, 1327, 4150, 3260, 3481, 3672, 3625, 2008, 4439, 3852, 3997, 1411, 599, 3847, 4993, 1268, 4050, 3377, 4424, 1496, 4143, 4493, 3492, 1962, 1412, 2455, 600, 2457, 1086, 601, 4017, 4477, 1794, 2483, 2291, 602, 4263, 3072, 2009, 2199, 1754, 1087, 1088, 3888, 603, 604, 4777, 2324, 605, 1368, 3827, 4103, 606, 607, 1089, 2220, 4549, 1090, 1571, 1091, 1438, 608, 1092, 609, 2320, 2069, 610, 611, 1093, 612, 1094, 3701, 4389, 613, 4897, 1603, 614, 1095, 5000, 615, 616, 2263, 1332, 1715, 4369, 1652, 1096, 617, 1541, 618, 1921, 1733, 1373, 1870, 619, 4218, 1798, 2387, 1097, 1098, 1099, 1100, 620, 1702, 621, 622, 4801, 4855, 4847, 2398, 2239, 1101, 1667, 1384, 623, 4745, 3700, 1788, 1600, 624, 2098, 625, 4550, 4721, 4960, 4878, 2473, 4792, 4675, 1102, 1423, 626, 2771, 627, 1339, 3875, 628, 629, 3070, 4565, 2118, 2015, 4818, 2557, 2795, 2906, 2103, 4869, 2029, 3299, 3118, 4932, 4838, 4901, 4908, 4996, 4779, 4657, 4646, 4875, 4627, 4515, 4876, 4965, 4605, 4576, 2028, 4985, 4850, 1103, 4757, 4747, 1614, 1947, 2237, 630, 631, 4997, 4618, 4479, 3766, 632, 1104, 1105, 4886, 1106, 2432, 633, 1107, 4530, 634, 2371, 4651, 1108, 4536, 635, 1813, 636, 2431, 4866, 4991, 4814, 4560, 4956, 637, 4555, 1109, 4941, 4577, 4633, 2213, 638, 639, 3706, 1110, 640, 1111, 641, 4581, 4893, 4831, 2481, 4644, 4734, 2190, 4524, 4881, 4837, 4888, 4648, 642, 4807, 4896, 4868, 2374, 1112, 4823, 2164, 1113, 3735, 3390, 1694, 3431, 2838, 3483, 3464, 3848, 2558, 3314, 3086, 3029, 2956, 3517, 2651, 2914, 2680, 2632, 3121, 3100, 3528, 3526, 3084, 4220, 3304, 2846, 1186, 3235, 2903, 3559, 2687, 3409, 3237, 2900, 2999, 3349, 3171, 2752, 3262, 3504, 3047, 4376, 3193, 3430, 2525, 2670, 2911, 3508, 2776, 2697, 3200, 2790, 3323, 2543, 2874, 2614, 3904, 3373, 3054, 2617, 4242, 3621, 2708, 4179, 4398, 3959, 4935, 1269, 3095, 1286, 3624, 4481, 1432, 3511, 2735, 4381, 3295, 1585, 2390, 1568, 1114, 1766, 3221, 2643, 2739, 643, 4735, 4760, 4629, 1115, 4918, 4688, 3920, 644, 4723, 4949, 4748, 4607, 4719, 1116, 645, 646, 4611, 2353, 4645, 4603, 4762, 4819, 2221, 4636, 4992, 4998, 2307, 647, 1801, 4279, 3762, 1637, 1509, 4843, 4797, 4590, 4995, 4541, 2200, 4580, 4858, 648, 649, 2502, 1117, 4780, 4800, 2477, 4724, 4551, 4674, 1118, 1119, 2965, 2369, 2695, 3293, 650, 651, 4730, 4862, 4722, 4944, 1120, 652, 1121, 4983, 4784, 4877, 4643, 653, 654, 4909, 1122, 3264, 655, 2076, 4849, 656, 657, 2447, 658, 659, 4035, 2910, 3391, 2808, 3099, 2913, 3676, 2852, 3284, 2731, 1609, 2375, 2201, 3537, 3994, 1319, 4467, 1802, 1227, 1623, 660, 4844, 2086, 4770, 4714, 4979, 4812, 2192, 1123, 661, 2364, 662, 663, 664, 1124, 1125, 665, 2487, 4899, 2138, 1126, 666, 667, 4569, 4554, 4917, 2322, 1127, 1128, 1129, 668, 669, 1130, 670, 1131, 1527, 1132, 671, 1772, 2314, 1133, 1134, 2470, 1135, 672, 2236, 4716, 673, 4600, 2196, 2456, 4606, 4588, 4963, 4851, 4558, 4557, 4697, 4610, 4773, 4687, 4708, 4910, 2123, 1136, 1137, 2358, 5005, 2208, 4952, 4945, 1933, 1731, 1793, 675, 676, 3342, 1138, 677, 4597, 4870, 1140, 4990, 4954, 4916, 678, 1141, 4737, 4527, 2253, 4531, 679, 1142, 1143, 680, 4771, 1144, 4638, 681, 4705, 4525, 4522, 4898, 2325, 2415, 5004, 1145, 682, 683, 2141, 1146, 684, 685, 2445, 686, 687, 4861, 2157, 688, 3822, 689, 690, 4743, 691, 1147, 1601, 692, 1148, 693, 4537, 4825, 4625, 4621, 3905, 694, 695, 1414, 1149, 696, 2027, 2159, 4756, 4690, 4859, 4793, 4575, 2160, 4828, 4731, 4718, 4802, 4750, 1150, 2081, 2258, 697, 1795, 1372, 1695, 1866, 1151, 4115, 1719, 2280, 4662, 698, 2176, 2194, 2217, 1920, 699, 700, 701, 4999, 1544, 4739, 702, 703, 4031, 4305, 1636, 1393, 2010, 3810, 4452, 3677, 4227, 1277, 1400, 4402, 4157, 4197, 1337, 1253, 1532, 4028, 3989, 2449, 4715, 704, 2050, 1493, 1854, 1902, 1510, 1152, 4824, 705, 2340, 4182, 706, 2442, 2484, 707, 708, 709, 4667, 1153, 2412, 4732, 4476, 2053, 710, 1375, 711, 712, 713, 4829, 4738, 4811, 4570, 4961, 1245, 714, 2045, 4707, 715, 2169, 4713, 1841, 4234, 4924, 1154, 1314, 4096, 2023, 716, 717, 4895, 718, 1155, 719, 720, 2063, 1311, 721, 4642, 722, 4833, 4903, 4885, 4666, 2249, 4217, 1156, 723, 1157, 1627, 2116, 4566, 2287, 1158, 2330, 4826, 4622, 4740, 724, 4700, 725, 1159, 5013, 4894, 726, 2434, 1953, 1160, 1201, 727, 3787, 2046, 1161, 728, 729, 2485, 2044, 4568, 3747, 2248, 730, 731, 2024, 1846, 2507, 2368, 1162, 2019, 2333, 3815, 2005, 2266, 1964, 2347, 2385, 732, 2177, 2059, 4958, 4927, 1822, 4815, 1262, 2094, 4480, 1537, 1291, 2419, 1318, 2283, 4976, 4628, 4294, 2486, 4926, 1582, 2162, 733, 4587, 734, 735, 3439, 2833, 4287, 4509, 4505, 4267, 3697, 3272, 4112, 2967, 3651, 1991, 1805, 1628, 3705, 2479, 736, 1195, 4863, 1163, 3859, 1164, 2394, 1165, 2355, 2351, 4679, 4835, 2259, 4839, 4571, 1166, 4968, 2250, 4912, 2423, 737, 1167, 4989, 4684, 4669, 4552, 4612, 2127, 1745, 1973, 4767, 1168, 2273, 2310, 3807, 4307, 1169, 2303, 1454, or 1781.

[0222] A VP capsid polypeptide may have a 581 to 589 region having a sequence of SEQ ID NO: 5014, wherein X³ of SEQ ID NO: 5014 is not E and X⁶ of SEQ ID NO: 5014 is not E. In some embodiments, the 581 to 589 region has a sequence of any one of SEQ ID NOs: 2498, 4884, 738, 739, 4177, 1289, 740, 14, 15, 741, 742, 743, 16, 744, 17, 18, 745, 3477, 1548, 3051, 2982, 2171, 2877, 746, 19, 20, 3036, 3426, 3073, 3169, 747, 2406, 3362, 2784, 4889, 21, 3192, 4942, 22, 23, 1638, 748, 24, 25, 749, 26, 27, 1703, 1836, 28, 2038, 2301, 3660, 29, 750, 30, 31, 32, 2095, 1640, 33, 35, 36, 37, 4742, 2450, 38, 4925, 39, 751, 752, 1653, 1205, 3795, 753, 4288, 4219, 2770, 2962, 4241, 4107, 2718, 3317, 4391, 4053, 3263, 2553, 3947, 2710, 2608, 3467, 2796, 2961, 2529, 3320, 2674, 2635, 3446, 3053, 3250, 3688, 1182, 1998, 4320, 3351, 2655, 3514, 2779, 3194, 3319, 3224, 3281, 3708, 2807, 3562, 3274, 3374, 3013, 3416, 2981, 3065, 2777, 3469, 2977, 2638, 2972, 3059, 2574, 3380, 4262, 3167, 3368, 2781, 3547, 3386, 1225, 2960, 3485, 3370, 3443, 2824, 754, 1467, 3327, 3178, 3006, 3252, 2991, 3470, 2888, 2572, 3418, 2642, 2519, 3363, 40, 2633, 41, 42, 43, 755, 2511, 44, 45, 756, 46, 757, 47, 48, 1952, 758, 2341, 2410, 49, 3122, 2551, 3718, 4806, 2216, 3484, 3577, 759, 2080, 50, 1308, 1230, 3960, 1378, 2994, 3080, 2589, 3681, 51, 4694, 2257, 52, 760, 53, 2389, 4934, 4951, 761, 762, 4659, 54, 2146, 3925, 55, 3654, 2087, 2346, 4766, 4682, 4984, 4744, 56, 763, 764, 4626, 4702, 58, 59, 60, 61, 4086, 1740, 1660, 765, 766, 62, 1966, 2032, 2499, 2332, 767, 63, 2096, 2181, 4913, 64, 768, 769, 770, 2384, 2402, 771, 65, 66, 2111, 67, 772, 2458, 2197, 68, 3816, 69, 2599, 2706, 2497, 70, 2234, 2183, 2399, 71, 4769, 2366, 72, 73, 74, 3865, 1549, 1361, 2453, 3882, 773, 3713, 1942, 75, 1312, 4501, 76, 77, 774, 1413, 775, 776, 78, 1560, 4289, 3757, 79, 3593, 4043, 1806, 3908, 4397, 1615, 4415, 3723, 2006, 3754, 1470, 4360, 80, 3945, 2854, 3523, 3669, 1356, 777, 2132, 2379, 82, 4065, 83, 84, 2030, 1294, 2413, 2064, 1484, 85, 4594, 86, 778, 87, 3891, 4456, 4040, 4496, 1982, 2001, 1478, 1189, 88, 1490, 1885, 1926, 89, 90, 91, 779, 2270, 780, 2161, 1180, 92, 781, 782, 783, 93, 2356, 784, 785, 786, 94, 95, 787, 788, 1831, 1867, 96, 4458, 97, 1970, 4656, 2173, 1936, 2349, 1590, 4585, 98, 99, 100, 789, 790, 1298, 101, 1688, 791, 792, 2007, 2070, 102, 793, 4632, 103, 794, 795, 104, 105, 106, 2229, 796, 4980, 4691, 107, 2440, 1849, 108, 2014, 797, 4736, 2509, 2018, 2227, 4787, 109, 1579, 110, 1906, 111, 2428, 798, 112, 2411, 113, 2359, 799, 4848, 800, 2461, 1444, 2313, 2350, 4579, 4821, 801, 114, 2329, 4834, 115, 1344, 116, 802, 117, 118, 119, 4929, 4677, 120, 2158, 121, 803, 804, 1463, 805, 122, 2139, 2290, 1760, 2465, 2424, 2058, 2230, 124, 4717, 806, 125, 126, 2370, 127, 4521, 128, 4971, 4994, 807, 2085, 129, 130, 131, 132, 4933, 808, 2336, 2026, 2204, 809, 810, 2281, 133, 1978, 134, 811, 812, 135, 136, 137, 138, 813, 814, 139, 4673, 140, 815, 1326, 141, 142, 143, 2344, 4544, 144, 145, 816, 4654, 4816, 1634, 1302, 817, 146, 818, 147, 148, 149, 4546, 150, 151, 152, 153, 154, 155, 819, 820, 156, 2149, 157, 2295, 821, 158, 159, 160, 161, 4631, 2441, 162, 163, 164, 165, 166, 822, 167, 168, 169, 170, 171, 823, 172, 4613, 824, 1651, 173, 1483, 174, 175, 825, 176, 177, 178, 179, 4624, 2170, 4809, 4520, 180, 826, 827, 181, 828, 4695, 4911, 182, 4582, 4873, 4596, 2020, 183, 4641, 829, 184, 185, 2244, 4647, 186, 187, 188, 189, 190, 2114, 830, 191, 192, 193, 194, 2071, 4615, 2361, 195, 4852, 2187, 4914, 4947, 196, 1391, 197, 4534, 4726, 4788, 198, 199, 4920, 831, 2240, 2223, 200, 201, 202, 203, 2106, 2503, 4775, 204, 205, 832, 833, 206, 834, 2232, 2294, 207, 2166, 208, 209, 210, 835, 836, 1334, 837, 3901, 3312, 2649, 1301, 211, 212, 1450, 4386, 3028, 213, 1446, 214, 2206, 215, 1896, 1522, 3490, 838, 216, 2241, 217, 218, 4653, 219, 1612, 220, 221, 222, 839, 223, 4953, 2360, 840, 224, 4928, 4741, 225, 2088, 4751, 5007, 4542, 226, 227, 4890, 4519, 4883, 228, 4786, 229, 230, 231, 2393, 2448, 841, 842, 232, 233, 4782, 234, 4962, 2269, 843, 235, 844, 236, 237, 4930, 845, 846, 238, 847, 4704, 239, 848, 849, 2150, 850, 851, 852, 853, 1536, 240, 854, 241, 242, 243, 244, 245, 246, 247, 248, 4923, 2245, 4696, 855, 4634, 856, 249, 250, 251, 252, 253, 254, 255, 857, 2115, 4880, 256, 257, 258, 259, 858, 859, 260, 261, 860, 861, 862, 262, 4966, 863, 864, 263, 4749, 4970, 2296, 2318, 865, 2326, 264, 1241, 265, 266, 866, 1477, 267, 867, 4977, 268, 868, 269, 4668, 5002, 270, 869, 870, 271, 871, 872, 272, 4822, 4709, 873, 4655, 4972, 2392, 874, 1252, 273, 1591, 4975, 875, 274, 2025, 275, 1980, 276, 876, 877, 2066, 277, 278, 279, 4670, 280, 2323, 2288, 2334, 4689, 281, 878, 1892, 879, 1539, 2214, 2215, 880, 2327, 881, 882, 4601, 883, 1295, 3601, 3877, 1930, 1420, 1678, 1460, 2306, 884, 282, 1799, 283, 284, 4988, 4553, 4772, 4817, 2260, 285, 1626, 2082, 885, 286, 1374, 886, 2119, 2468, 287, 1620, 1290, 2425, 2482, 4671, 2282, 288, 2354, 1354, 2033, 289, 887, 290, 888, 291, 1956, 2467, 889, 2357, 4547, 4765, 292, 4794, 2391, 4324, 890, 294, 295, 4138, 891, 2297, 296, 2224, 3903, 297, 892, 3829, 298, 299, 3809, 4271, 3844, 1436, 300, 1515, 1617, 4701, 2174, 301, 1961, 4649, 5010, 302, 303, 304, 305, 2452, 2147, 306, 2293, 1589, 893, 4370, 4841, 2342, 307, 308, 309, 894, 2246, 2155, 3646, 4059, 1431, 1331, 310, 311, 4836, 4948, 312, 895, 1779, 313, 314, 315, 316, 896, 1558, 1552, 317, 2312, 318, 319, 897, 320, 898, 321, 322, 899, 1958, 2022, 2016, 900, 2454, 323, 2427, 2134, 324, 901, 325, 902, 326, 2373, 4803, 2459, 1491, 327, 328, 903, 2463, 2264, 329, 330, 904, 1635, 4820, 905, 2506, 331, 4706, 2092, 4484, 1756, 906, 907, 4661, 2179, 4584, 332, 4907, 4635, 4529, 4683, 4523, 4561, 333, 2337, 3536, 2701, 2799, 3332, 3294, 3159, 3069, 2637, 3025, 2782, 3247, 3350, 2692, 2586, 3004, 3049, 2694, 2650, 3554, 2983, 3403, 3214, 3163, 2541, 3090, 3097, 3462, 1430, 2941, 3486, 2842, 3558, 3104, 3037, 3419, 2780, 2931, 1276, 2928, 2609, 3068, 3128, 2548, 2538, 2618, 2789, 3228, 2657, 3189, 2128, 2863, 3307, 3300, 2546, 3048, 3543, 2946, 2975, 3346, 3067, 2728, 2955, 3408, 3027, 3094, 3203, 2988, 2751, 2953, 2566, 2578, 2823, 3063, 3335, 3000, 3181, 3011, 3138, 3389, 2805, 3074, 2894, 3149, 2560, 3417, 3265, 3378, 2901, 2837, 2822, 2745, 3473, 3530, 3040, 2597, 3509, 3522, 3161, 2926, 3209, 3105, 3400, 2630, 2905, 2671, 2818, 2806, 2702, 2709, 2400, 3549, 3538, 2534, 2773, 2623, 3491, 3243, 3136, 2693, 3164, 3343, 2918, 2555, 2794, 2679, 3510, 3110, 2672, 3442, 2929, 3184, 3488, 2135, 4763, 3414, 3093, 2996, 3141, 3544, 3102, 2856, 2957, 3466, 3461, 2788, 2660, 3344, 3204, 2720, 3379, 2826, 1789, 2396, 2785, 3249, 3527, 4460, 3352, 2051, 2569, 4457, 2011, 4857, 2163, 4783, 4319, 3906, 1533, 1755, 1888, 4248, 1557, 2153, 3804, 1363, 1934, 1602, 1404, 4188, 1330, 4349, 3337, 3533, 2629, 3038, 2539, 3567, 3291, 3348, 3115, 3359, 2993, 3079, 3506, 2527, 2963, 2938, 2516, 3113, 1345, 2639, 3143, 3044, 2747, 3154, 3280, 3039, 2743, 2902, 3056, 2554, 2522, 3103, 3210, 3434, 2656, 4251, 4166, 4196, 3206, 3328, 2588, 3553, 2714, 3078, 3222, 3137, 3357, 2717, 2944, 3012, 3220, 3202, 2811, 3083, 3269, 3566, 2699, 2515, 3023, 2533, 3288, 3075, 3005, 2685, 3058, 2976, 2622, 3333, 3463, 2939, 3521, 3268, 3117, 2626, 2616, 3240, 2570, 3565, 2919, 3157, 2849, 3444, 2631, 3420, 2659, 3325, 3186, 2920, 3258, 3440, 3457, 3310, 2761, 3134, 2621, 3531, 2711, 2774, 2867, 2585, 3155, 2620, 3156, 2844, 3126, 3160, 2909, 3542, 3225, 2887, 3474, 3218, 2744, 2896, 3135, 3424, 3498, 3529, 2661, 2667, 2549, 2819, 2768, 2935, 3182, 2772, 3230, 3043, 2922, 3581, 3524, 2869, 2610, 3298, 2775, 3108, 2603, 3614, 2612, 2860, 3187, 3238, 3786, 4385, 3016, 3436, 2876, 2987, 3532, 3438, 3561, 3259, 2663, 2890, 3433, 3071, 3018, 2580, 2755, 3015, 2540, 3398, 2664, 2583, 2830, 2644, 2641, 3513, 2725, 2723, 3338, 3556, 2866, 2514, 2932, 2753, 2862, 2899, 2605, 2989, 3096, 3124, 2985, 2716, 3145, 3017, 2591, 2640, 3033, 1853, 3216, 3316, 3412, 2971, 3256, 3153, 3575, 3339, 2915, 2531, 3552, 3475, 3060, 3375, 2756, 3382, 2847, 2859, 3251, 3702, 3423, 2537, 2801, 3076, 2696, 3092, 3459, 3144, 3441, 2802, 3479, 2907, 3512, 3518, 3021, 2871, 3032, 2647, 2945, 3045, 2763, 3313, 3034, 3315, 3541, 2746, 2669, 2524, 3003, 2732, 3166, 3046, 3306, 2873, 3364, 3253, 3215, 3061, 2804, 2722, 2964, 2990, 2836, 4098, 4449, 3173, 2762, 3737, 2628, 3507, 2564, 3031, 2872, 3360, 2658, 2930, 2904, 3244, 3217, 3311, 3445, 2840, 3372, 2958, 3098, 3356, 3456, 3388, 2624, 3207, 2576, 2742, 2665, 2815, 3052, 3421, 2593, 3242, 2535, 2966, 2898, 2858, 2943, 2668, 2798, 3196, 2528, 2713, 3001, 2691, 2948, 2767, 2544, 3302, 2734, 2893, 2592, 2861, 3502, 2969, 2582, 3229, 2676, 2545, 3255, 3330, 2547, 3257, 2882, 3151, 3088, 2883, 3318, 2645, 2733, 2587, 3500, 3008, 2715, 2845, 3183, 2654, 3233, 3267, 2741, 2827, 2704, 3091, 2832, 2736, 3177, 3271, 2835, 2908, 3176, 2947, 3292, 3191, 2517, 3026, 3082, 3392, 3381, 2584, 2712, 3213, 3451, 2634, 3150, 2810, 3303, 2573, 3460, 2615, 3394, 2828, 3329, 4377, 4499, 3555, 2974, 3782, 3629, 3578, 3885, 2817, 3248, 2954, 3334, 3571, 3345, 3551, 3384, 3422, 1357, 1844, 2530, 2973, 4418, 4081, 3951, 1764, 1671, 1852, 334, 1843, 3449, 3185, 3399, 2786, 3055, 3472, 3397, 2601, 3564, 3277, 4373, 3548, 3179, 3407, 3841, 3347, 3142, 4255, 4431, 3241, 3077, 2700, 3147, 2648, 3283, 2829, 3278, 2581, 2536, 4363, 2848, 3410, 2797, 2523, 2520, 2721, 3496, 2571, 3198, 3219, 3030, 2673, 2921, 3837, 3301, 3322, 2705, 3239, 2949, 3369, 3396, 2892, 2897, 2766, 3174, 3297, 2550, 2889, 2933, 2793, 2627, 2677, 3119, 2596, 3226, 3172, 3089, 2868, 2839, 3942, 3120, 3286, 2843, 3465, 1564, 3946, 4222, 1504, 3999, 2682, 1875, 2865, 3539, 3168, 2864, 3308, 3557, 2940, 3109, 3503, 2625, 3455, 3114, 2595, 3331, 2978, 2518, 2521, 4079, 3024, 3573, 2952, 2653, 1769, 3180, 2813, 2652, 2600, 2816, 3201, 3188, 3270, 2997, 2992, 3009, 3520, 2936, 3275, 3165, 3447, 3131, 3305, 2809, 2792, 2729, 2814, 2619, 3266, 2825, 3066, 2857, 2998, 3064, 2681, 3035, 3279, 2764, 3480, 3127, 2912, 3010, 2607, 3211, 3111, 3041, 1573, 3909, 4269, 3487, 3489, 3019, 335, 1266, 1415, 2980, 3428, 2444, 3435, 3482, 3020, 2748, 2646, 2787, 2760, 2563, 3085, 3133, 3158, 3170, 2703, 3494, 2556, 2552, 3395, 3245, 3404, 2675, 2791, 2252, 4845, 1911, 4856, 908, 1935, 4711, 4728, 2460, 4517, 2749, 3341, 3355, 2575, 2942, 2886, 2758, 2594, 3495, 2884, 3516, 3042, 2737, 2923, 3563, 2855, 3476, 2611, 2937, 3383, 3497, 3402, 3162, 2662, 2875, 3223, 2878, 2079, 1808, 3285, 2757, 3057, 2951, 3519, 2579, 2853, 3387, 3401, 3493, 3393, 1608, 3365, 2885, 3574, 3081, 3007, 3568, 3152, 3367, 3358, 336, 2268, 3468, 3290, 3550, 3132, 2726, 2879, 3190, 3309, 2613, 2765, 3106, 1355, 3454, 2851, 2881, 3232, 3458, 3326, 3353, 2927, 3212, 2950, 3376, 3208, 3062, 3612, 3195, 3385, 2686, 2602, 3569, 3123, 2727, 1622, 2821, 2636, 2750, 2850, 3050, 2925, 3336, 3540, 2689, 3139, 2526, 3361, 3022, 3427, 3107, 3140, 3371, 3276, 2831, 3501, 2924, 3366, 3199, 3101, 3321, 3499, 2917, 2683, 2800, 2812, 3340, 3227, 3148, 3657, 4446, 1746, 1464, 1886, 2666, 3246, 3130, 3560, 3236, 2730, 3572, 1607, 3689, 2968, 1457, 1500, 909, 337, 1184, 3450, 2577, 2567, 2532, 3415, 2934, 2984, 2568, 4147, 3002, 2986, 910, 2979, 2542, 2492, 1762, 4472, 1472, 1529, 2319, 2131, 4057, 2048, 1976, 4507, 1583, 338, 2078, 2372, 339, 911, 1711, 340, 912, 2013, 913, 2277, 914, 341, 915, 4672, 4902, 916, 342, 1594, 4440, 917, 343, 344, 4559, 918, 2233, 919, 345, 920, 346, 921, 922, 347, 2226, 348, 2180, 2298, 349, 350, 2099, 2036, 351, 4808, 923, 924, 4498, 1518, 3728, 3637, 3570, 3429, 4091, 2870, 2995, 4338, 3205, 2880, 3261, 1994, 3968, 4291, 4204, 4071, 4034, 1742, 2820, 3912, 3287, 1218, 1190, 4145, 353, 2422, 354, 355, 925, 1782, 2184, 2261, 2490, 926, 927, 928, 4630, 2137, 3610, 356, 357, 4729, 358, 359, 4224, 1918, 1959, 1840, 3736, 2471, 1770, 929, 930, 931, 4155, 360, 361, 362, 932, 363, 364, 1279, 2289, 365, 1543, 366, 2156, 2472, 367, 4049, 1633, 1722, 368, 369, 1495, 1566, 370, 4967, 372, 373, 1211, 1873, 2101, 2494, 1726, 374, 1442, 933, 1748, 4142, 1434, 1358, 1191, 3732, 4110, 4039, 4411, 4506, 4270, 4156, 3780, 4036, 4030, 4016, 1550, 3899, 1247, 1855, 1181, 3919, 1639, 3664, 1244, 4140, 3930, 4117, 4189, 4001, 3799, 3643, 3619, 1240, 1686, 1479, 1307, 1575, 4296, 1665, 3871, 4135, 1605, 4408, 3604, 1274, 4149, 1313, 3741, 1938, 3709, 1727, 3893, 1280, 3622, 1784, 3834, 1752, 1983, 1743, 3979, 4461, 4113, 3817, 4232, 1340, 1489, 4214, 3902, 1857, 2316, 1904, 1219, 1486, 1512, 1481, 1516, 3820, 3789, 4252, 4047, 4330, 4082, 4094, 1574, 1248, 4078, 1872, 1426, 3785, 3687, 4318, 4243, 3866, 3704, 4172, 1621, 4315, 1192, 1513, 1856, 3324, 2769, 2678, 1561, 3296, 375, 2343, 376, 377, 1395, 1584, 4093, 4453, 3940, 3778, 4374, 4210, 4009, 4264, 4339, 4368, 1738, 378, 1610, 4194, 4474, 4013, 4266, 1771, 1759, 1922, 3860, 3832, 1349, 1381, 3663, 1642, 1185, 4356, 3932, 1233, 4212, 3858, 1198, 4192, 3611, 1919, 1819, 3790, 3712, 1969, 4095, 1887, 4468, 1720, 4247, 934, 1790, 2002, 1657, 1663, 1336, 3894, 1554, 1494, 1405, 3576, 4314, 3695, 1851, 1850, 4362, 1815, 3845, 4511, 3656, 3638, 1406, 1596, 4454, 1443, 1661, 935, 4504, 1359, 1734, 3650, 1910, 1305, 1648, 3831, 4435, 1208, 1988, 4451, 1993, 1986, 3849, 1718, 4068, 1835, 1425, 1428, 1282, 4380, 1658, 1452, 1687, 4024, 379, 4072, 3791, 4491, 4323, 4014, 1304, 1440, 1511, 1981, 1676, 1547, 4422, 1283, 3861, 1383, 3644, 3691, 4259, 1749, 1418, 1176, 4216, 1924, 1421, 3992, 4423, 4253, 1618, 1871, 1256, 3748, 4119, 1297, 1586, 1251, 1299, 1954, 4450, 3990, 4029, 4097, 3890, 3796, 1389, 3711, 4344, 1578, 1476, 4343, 1202, 4413, 4384, 3808, 1647, 1475, 3892, 3674, 1739, 3926, 3595, 1943, 3756, 4405, 3973, 4109, 4159, 3744, 4387, 1960, 4275, 3781, 1535, 1210, 4492, 4365, 4118, 3655, 3886, 4278, 4383, 4485, 1392, 3751, 3931, 3986, 3678, 1249, 4353, 4208, 3710, 4238, 4213, 3969, 4436, 3175, 4128, 2970, 1228, 3534, 3437, 3406, 3641, 3639, 3954, 4335, 3995, 3582, 4475, 3784, 4470, 4010, 3802, 3941, 4427, 4396, 4348, 3587, 3818, 3864, 3956, 3863, 3731, 3814, 4067, 4354, 4350, 4334, 3821, 1932, 3929, 4171, 1258, 3824, 3631, 4465, 4494, 1320, 1398, 3828, 1204, 1223, 1284, 1685, 3773, 4209, 3014, 4462, 4246, 4190, 4312, 4023, 3760, 3753, 1178, 3884, 2783, 4038, 3545, 2916, 3112, 2834, 3880, 3673, 4102, 4399, 4048, 3752, 4207, 1235, 3943, 4355, 4087, 4100, 4327, 4037, 4163, 3918, 4486, 1243, 3933, 4178, 1662, 1643, 4152, 3634, 3617, 4445, 4303, 1370, 3838, 4199, 4284, 1213, 4382, 1399, 1187, 3714, 1828, 4487, 3615, 1842, 1501, 3746, 4018, 4420, 3606, 4121, 3724, 3935, 4419, 4282, 1955, 1949, 4310, 4488, 1577, 4127, 1288, 1171, 3670, 4052, 3627, 3777, 936, 1371, 3685, 1325, 1940, 380, 4482, 4258, 3812, 1581, 1860, 4124, 4508, 4500, 3652, 3972, 1309, 1630, 1528, 3717, 1217, 3692, 4430, 3764, 4316, 4285, 3645, 3971, 4421, 1172, 4026, 2740, 3125, 3546, 1725, 1206, 3842, 4404, 3690, 3962, 4513, 4340, 4329, 4410, 3703, 4136, 1763, 1487, 3589, 3907, 4153, 2707, 3730, 4426, 4180, 4041, 3923, 4444, 3851, 4429, 4361, 1441, 4394, 4302, 3758, 4510, 3742, 1868, 4077, 1710, 1939, 1335, 1666, 1407, 4187, 1193, 1188, 1196, 1724, 1717, 1200, 1646, 1997, 1975, 1701, 4280, 1613, 4006, 1984, 1351, 3653, 3833, 1593, 2561, 4442, 3900, 4298, 1761, 4388, 1820, 1597, 4317, 4249, 1341, 1203, 1680, 4441, 3628, 3725, 1945, 937, 4206, 1588, 1439, 3794, 4447, 1838, 3776, 3658, 4064, 1377, 4011, 4272, 4503, 1324, 1367, 3594, 3680, 1300, 1750, 3913, 3774, 1877, 1987, 1862, 3998, 1380, 4185, 3686, 3696, 4463, 1350, 4008, 4230, 3853, 4244, 4083, 381, 1909, 3897, 1546, 382, 3613, 3273, 3452, 3525, 1229, 4105, 3835, 383, 1263, 1234, 3970, 1492, 3856, 3586, 1175, 4321, 4020, 4144, 1224, 1199, 3667, 2778, 4412, 4407, 1812, 1810, 3823, 1416, 1427, 1507, 1878, 4333, 3146, 4281, 4211, 1179, 3843, 1669, 1677, 1524, 1525, 1974, 384, 1979, 1456, 1239, 4167, 3740, 1876, 1388, 1967, 1474, 385, 1342, 1471, 4176, 1232, 1989, 4125, 1741, 1508, 1580, 4060, 4378, 1576, 1212, 1893, 3921, 3585, 1174, 1396, 4061, 4015, 1207, 3698, 3825, 3922, 4021, 4181, 1598, 1916, 1429, 4502, 4231, 1321, 4390, 3693, 3734, 1382, 3684, 1747, 3806, 3896, 3635, 1768, 4025, 3976, 3840, 3963, 4286, 1502, 3836, 4161, 3659, 3743, 4130, 3605, 1385, 1783, 4392, 4328, 1316, 4173, 4265, 1246, 1985, 1629, 1829, 1737, 3826, 1473, 1992, 1883, 1656, 1837, 1914, 1839, 1834, 3984, 4495, 3910, 4160, 3671, 4184, 4132, 4250, 1503, 1237, 1523, 1417, 4063, 1562, 3977, 1971, 1707, 1847, 1792, 3769, 4074, 1534, 4239, 4003, 3915, 1689, 1776, 1599, 1265, 1410, 1823, 1498, 1329, 939, 386, 940, 1655, 3874, 4261, 3626, 1791, 3579, 1644, 3936, 4054, 4260, 4359, 4131, 4297, 4357, 4022, 3770, 4046, 1222, 1996, 3788, 4169, 1925, 3953, 4228, 4226, 4277, 4101, 1889, 1369, 3797, 4088, 4019, 3771, 3632, 1402, 388, 1520, 1767, 1466, 1194, 4137, 1908, 1927, 1758, 3772, 3661, 4186, 4174, 1170, 3850, 1315, 1611, 1530, 1859, 2209, 4183, 1408, 1403, 941, 4033, 3623, 3596, 1461, 1848, 1173, 1928, 1459, 1765, 1826, 3719, 1931, 3584, 4004, 3591, 3967, 4168, 3957, 3878, 4165, 4191, 3980, 4058, 4200, 4336, 3958, 1260, 4051, 3798, 4032, 1774, 4322, 3991, 4106, 1641, 1570, 3978, 3965, 4464, 3813, 4154, 1365, 4257, 3846, 4345, 4379, 3603, 1693, 3937, 3801, 1787, 1214, 4483, 4201, 1898, 1845, 1226, 1220, 4245, 1347, 3867, 1900, 3640, 3916, 4089, 1209, 3745, 3988, 3975, 4236, 4075, 4146, 4256, 4308, 4000, 4148, 3588, 3868, 4403, 3883, 4326, 4393, 3895, 4237, 3955, 3727, 4005, 4092, 4372, 4283, 1553, 3805, 4151, 1281, 1681, 4489, 3982, 4437, 3597, 4342, 3872, 3987, 4490, 3876, 3668, 4300, 1679, 1242, 3598, 3583, 3647, 389, 4304, 3793, 3779, 1937, 1907, 4042, 3648, 3996, 3800, 4367, 4099, 1807, 3887, 4428, 1625, 1390, 1884, 1682, 4364, 4306, 3869, 1278, 1672, 942, 1505, 1542, 1709, 1915, 3600, 3914, 1968, 3948, 1670, 3811, 1865, 1362, 943, 1716, 3961, 1506, 4221, 1376, 944, 1683, 4276, 1445, 1721, 1632, 3607, 1328, 1455, 1913, 1497, 1317, 1951, 1778, 1379, 3768, 4225, 1668, 2383, 945, 390, 391, 4406, 4341, 1480, 392, 393, 394, 395, 1714, 1422, 396, 2043, 946, 2265, 397, 3618, 4433, 1177, 3898, 398, 2251, 947, 948, 2212, 949, 950, 399, 951, 400, 1965, 4640, 2129, 2345, 4471, 952, 953, 402, 2475, 403, 404, 4758, 955, 2437, 4139, 1482, 3602, 4434, 3721, 1592, 1825, 1698, 1519, 1352, 4202, 4409, 1977, 1917, 405, 406, 407, 408, 956, 2272, 957, 2267, 1631, 1684, 409, 2054, 3889, 958, 410, 2117, 411, 959, 412, 960, 2443, 4712, 4619, 2285, 414, 415, 961, 2352, 2417, 962, 1905, 416, 963, 417, 418, 3675, 1833, 3974, 419, 964, 421, 965, 966, 967, 968, 2365, 969, 970, 422, 1897, 2056, 2309, 4733, 1272, 4754, 2207, 971, 423, 4133, 3830, 4865, 972, 424, 973, 425, 2068, 4955, 426, 974, 427, 1708, 4676, 428, 4141, 430, 3749, 431, 1619, 975, 4044, 3590, 1944, 4126, 1923, 1706, 432, 976, 977, 978, 4867, 4400, 433, 434, 1606, 2143, 979, 435, 980, 2604, 2895, 981, 436, 3448, 4959, 2188, 437, 438, 1692, 982, 2388, 2433, 2243, 983, 2035, 2120, 4940, 439, 440, 2474, 442, 2052, 4764, 3862, 4055, 4358, 984, 2435, 4589, 2276, 2401, 985, 1664, 443, 2073, 2405, 986, 4309, 4045, 3854, 3682, 2491, 444, 445, 1972, 2688, 4366, 3425, 3231, 3649, 2759, 2724, 3873, 3755, 1216, 3599, 3775, 2754, 2606, 3471, 3234, 2565, 2803, 2562, 2684, 3411, 3405, 2690, 1255, 3694, 446, 3985, 3535, 1306, 4084, 3282, 447, 1353, 2168, 1780, 987, 988, 989, 2126, 448, 449, 2107, 450, 2031, 990, 451, 452, 991, 1485, 453, 992, 1728, 993, 4703, 994, 995, 454, 1696, 996, 2039, 455, 997, 998, 3116, 1869, 456, 4759, 2500, 4798, 2262, 4562, 457, 1386, 999, 458, 4768, 4982, 4778, 2040, 1000, 4981, 3879, 2698, 459, 460, 1001, 461, 1447, 462, 1002, 2042, 2339, 1003, 463, 464, 4425, 1645, 465, 1004, 467, 468, 469, 1231, 1468, 470, 471, 2496, 472, 473, 1005, 474, 475, 2108, 4725, 476, 1273, 1007, 1744, 1488, 1659, 477, 478, 4598, 1604, 4753, 2493, 479, 1008, 1009, 480, 1011, 1012, 1013, 1014, 481, 4313, 482, 483, 1499, 484, 1015, 4761, 2091, 2513, 1016, 4073, 1777, 2172, 485, 2205, 4592, 4545, 486, 1458, 4274, 2122, 4905, 5003, 4599, 4796, 2152, 4539, 4528, 4904, 4842, 4986, 4846, 4650, 4595, 2195, 4681, 2142, 487, 4710, 1775, 4205, 1526, 4586, 4602, 4518, 1697, 1017, 2000, 4692, 4795, 2480, 488, 2335, 489, 4969, 1894, 1882, 1817, 1880, 490, 1018, 3917, 3616, 4311, 1800, 4473, 4085, 4401, 1310, 3783, 3765, 1538, 3870, 491, 1948, 3699, 1735, 3792, 4290, 2074, 492, 2202, 5001, 2136, 493, 2211, 4532, 494, 2421, 495, 4090, 2378, 2104, 2210, 2247, 2478, 2047, 496, 4620, 4978, 4614, 1019, 2012, 1803, 3642, 497, 1322, 1020, 498, 1021, 2235, 2302, 2488, 4665, 4540, 5006, 499, 2049, 4685, 500, 501, 1022, 502, 1333, 503, 1023, 4686, 4804, 504, 4727, 505, 506, 4938, 4805, 2065, 1890, 4891, 1024, 507, 508, 509, 1025, 510, 1026, 3608, 1732, 511, 2397, 1864, 1816, 1531, 512, 513, 2451, 3636, 5012, 4892, 514, 1699, 4593, 1027, 4987, 515, 2495, 4660, 1028, 516, 1029, 2409, 1366, 2112, 2178, 2124, 2376, 5011, 4572, 4957, 4789, 4543, 4664, 4678, 2093, 4746, 2489, 4922, 2145, 1030, 4832, 4950, 1261, 4027, 3478, 3763, 2959, 1293, 2462, 517, 3197, 1595, 3413, 2238, 1031, 2228, 518, 2057, 2305, 2133, 2061, 4526, 4617, 1033, 2429, 2311, 1675, 4785, 1797, 519, 4578, 2271, 2466, 2148, 2420, 520, 4854, 2381, 2315, 2284, 4813, 521, 1034, 522, 523, 1999, 3759, 1215, 4122, 1730, 524, 525, 526, 3966, 4573, 5008, 1035, 527, 4973, 2508, 528, 3911, 529, 3289, 1821, 530, 531, 2426, 1036, 532, 1874, 533, 534, 1037, 535, 1038, 536, 1039, 537, 538, 539, 1040, 3767, 1929, 1042, 3683, 2100, 4853, 2300, 2165, 540, 541, 1043, 4906, 542, 1338, 2292, 2021, 1616, 1901, 1796, 1517, 4331, 4332, 4466, 2719, 3803, 4123, 4233, 1824, 3129, 3087, 3505, 4158, 4254, 1449, 1044, 3720, 4351, 4414, 1673, 3453, 3254, 2501, 1649, 543, 544, 545, 546, 1045, 547, 4240, 3580, 4680, 1046, 548, 2062, 1047, 550, 2598, 551, 552, 553, 3819, 1259, 4062, 1048, 554, 2841, 1049, 1050, 3515, 2219, 1433, 1323, 4301, 555, 556, 1051, 557, 558, 1052, 1053, 3738, 1567, 559, 1054, 1270, 3857, 1055, 2151, 560, 2175, 2089, 1056, 2198, 2193, 1257, 1238, 3662, 561, 2186, 1057, 4637, 562, 1058, 563, 4872, 2097, 564, 1059, 565, 566, 1060, 1061, 2231, 4203, 1899, 3981, 1062, 1303, 4116, 567, 1063, 568, 569, 570, 2367, 1946, 3620, 1064, 1514, 4002, 3679, 3964, 3707, 3666, 1348, 4273, 1804, 4497, 571, 1401, 4438, 1895, 1264, 572, 1912, 573, 3939, 4170, 4056, 1271, 1065, 1521, 1221, 1066, 1451, 1654, 1067, 3934, 4080, 4352, 574, 1700, 3739, 1565, 1419, 1811, 3950, 1690, 1397, 3716, 1569, 1465, 1437, 1674, 4337, 1285, 4268, 1183, 3726, 3881, 4134, 4347, 4012, 3938, 4066, 4198, 4416, 4164, 3630, 4229, 4292, 4193, 4325, 4375, 4371, 4432, 4215, 1753, 3944, 1409, 4195, 1729, 4223, 1540, 4455, 1068, 1069, 4512, 1723, 1070, 3750, 3633, 4070, 4104, 4162, 4235, 1863, 4346, 1881, 1814, 1572, 2418, 575, 4443, 3761, 1346, 1587, 1072, 3592, 576, 1891, 4469, 2430, 1275, 577, 1950, 1963, 4129, 1073, 1296, 1360, 1551, 3733, 4111, 3993, 4108, 3949, 1287, 1713, 1556, 1736, 1995, 1435, 1424, 1830, 1705, 1861, 1197, 1254, 4120, 1545, 4417, 1469, 1292, 2279, 1785, 1236, 4293, 1827, 3839, 3983, 4395, 1957, 2222, 578, 3928, 4295, 3715, 3855, 3609, 1990, 4076, 4175, 3927, 1757, 1650, 4299, 1773, 2004, 1267, 1364, 579, 1462, 1879, 4007, 3729, 3665, 3722, 1691, 1712, 1074, 1624, 1751, 1394, 3924, 3952, 580, 581, 2003, 1343, 2203, 1559, 1250, 1555, 582, 2395, 4114, 1818, 1075, 583, 1076, 1077, 1704, 4448, 584, 4882, 1078, 1079, 1786, 585, 3354, 1832, 586, 3432, 2891, 587, 588, 4583, 2505, 1903, 2077, 4936, 4658, 4830, 2446, 1080, 2278, 1081, 1082, 4459, 1083, 589, 1563, 1084, 2255, 2113, 590, 591, 1085, 592, 2308, 593, 594, 2274, 595, 4931, 2407, 1858, 596, 597, 598, 1453, 2559, 2590, 2738, 4478, 4069, 1809, 1327, 4150, 3260, 3481, 3672, 3625, 2008, 4439, 3852, 3997, 1411, 599, 3847, 4993, 1268, 4050, 3377, 4424, 1496, 4143, 4493, 3492, 1962, 1412, 2455, 600, 2457, 1086, 601, 4017, 4477, 1794, 2483, 2291, 602, 4263, 3072, 2009, 2199, 1754, 1087, 1088, 3888, 603, 604, 4777, 2324, 605, 1368, 3827, 4103, 606, 607, 1089, 2220, 4549, 1090, 1571, 1091, 1438, 608, 1092, 609, 610, 611, 1093, 612, 1094, 3701, 4389, 613, 4897, 1603, 614, 1095, 5000, 615, 616, 2263, 1332, 1715, 4369, 1652, 1096, 617, 1541, 618, 1921, 1733, 1373, 1870, 619, 4218, 1798, 2387, 1097, 1098, 1099, 1100, 620, 1702, 621, 622, 4801, 2398, 2239, 1101, 1667, 1384, 623, 4745, 3700, 1788, 1600, 624, 2098, 625, 4550, 4721, 4960, 4878, 2473, 4792, 4675, 1102, 1423, 626, 2771, 627, 1339, 3875, 628, 629, 3070, 4565, 2118, 4818, 2557, 2795, 2906, 2103, 4869, 2029, 3299, 3118, 4932, 4838, 4901, 4657, 4646, 4875, 4627, 4515, 4876, 4965, 4605, 4576, 2028, 4985, 4850, 1103, 4747, 1614, 1947, 2237, 630, 631, 4618, 4479, 3766, 632, 1104, 1105, 4886, 1106, 2432, 633, 1107, 4530, 634, 2371, 4651, 1108, 4536, 635, 1813, 636, 2431, 4866, 4991, 4814, 4560, 4956, 637, 4555, 1109, 4941, 4577, 2213, 638, 639, 3706, 1110, 640, 1111, 641, 4581, 4893, 4831, 2481, 4644, 4734, 2190, 4524, 4881, 4837, 4888, 4648, 642, 4807, 4896, 4868, 2374, 1112, 4823, 2164, 1113, 3735, 3390, 1694, 3431, 2838, 3483, 3464, 3848, 2558, 3314, 3086, 3029, 2956, 3517, 2651, 2914, 2680, 2632, 3121, 3100, 3528, 3526, 3084, 4220, 3304, 2846, 1186, 3235, 2903, 3559, 2687, 3409, 3237, 2900, 2999, 3349, 3171, 2752, 3262, 3504, 3047, 4376, 3193, 3430, 2525, 2670, 2911, 3508, 2776, 2697, 3200, 2790, 3323, 2543, 2874, 2614, 3904, 3373, 3054, 2617, 4242, 3621, 2708, 4179, 4398, 3959, 4935, 1269, 3095, 1286, 3624, 4481, 1432, 3511, 2735, 4381, 3295, 1585, 2390, 1568, 1114, 1766, 3221, 2643, 2739, 643, 4735, 4760, 1115, 4918, 4688, 3920, 644, 4723, 4949, 4748, 4607, 4719, 1116, 645, 646, 4611, 2353, 4645, 4998, 2307, 647, 1801, 4279, 3762, 1637, 1509, 4843, 4797, 4590, 4995, 4541, 2200, 4580, 4858, 648, 649, 2502, 1117, 4780, 4800, 4551, 4674, 1118, 1119, 2965, 2369, 2695, 3293, 650, 651, 4730, 4862, 4722, 4944, 1120, 652, 1121, 4983, 4784, 4877, 4643, 653, 654, 4909, 1122, 3264, 655, 2076, 4849, 656, 657, 2447, 658, 659, 4035, 2910, 3391, 2808, 3099, 2913, 3676, 2852, 3284, 2731, 1609, 2375, 2201, 3537, 3994, 1319, 4467, 1802, 1227, 1623, 660, 4844, 2086, 4770, 2192, 1123, 661, 2364, 662, 663, 664, 1124, 1125, 665, 2487, 4899, 2138, 1126, 666, 667, 4569, 4554, 4917, 2322, 1127, 1128, 1129, 668, 669, 1130, 670, 1131, 1527, 1132, 671, 1772, 2314, 1133, 1134, 2470, 1135, 672, 2236, 4716, 673, 4600, 2196, 2456, 4606, 4910, 2123, 1136, 1137, 2358, 5005, 2208, 4952, 4945, 1933, 1731, 1793, 675, 676, 3342, 1138, 677, 4597, 4870, 1140, 4990, 4954, 4916, 678, 1141, 4737, 4527, 2253, 4531, 679, 1142, 1143, 680, 4771, 1144, 4638, 681, 4705, 4525, 4522, 4898, 2325, 2415, 5004, 1145, 682, 683, 1146, 684, 685, 2445, 686, 687, 4861, 2157, 688, 3822, 689, 690, 4743, 691, 1147, 1601, 692, 1148, 693, 4537, 4825, 4625, 4621, 3905, 694, 695, 1414, 1149, 696, 2027, 2159, 4756, 4793, 4575, 2160, 4828, 4731, 4718, 4802, 4750, 1150, 2081, 2258, 697, 1795, 1372, 1695, 1866, 1151, 4115, 1719, 2280, 4662, 698, 2176, 2194, 2217, 1920, 699, 700, 701, 4999, 1544, 4739, 702, 703, 4031, 4305, 1636, 1393, 2010, 3810, 4452, 3677, 4227, 1277, 1400, 4402, 4157, 4197, 1337, 1253, 1532, 4028, 3989, 2449, 4715, 704, 2050, 1493, 1854, 1902, 1510, 1152, 4824, 705, 2340, 4182, 706, 2442, 2484, 707, 708, 709, 4667, 1153, 2412, 4476, 2053, 710, 1375, 711, 712, 713, 4829, 4738, 4811, 4570, 4961, 1245, 714, 2045, 4707, 715, 2169, 4713, 1841, 4234, 4924, 1154, 1314, 4096, 2023, 716, 717, 4895, 718, 1155, 719, 720, 2063, 1311, 721, 4642, 722, 4885, 4666, 2249, 4217, 1156, 723, 1157, 1627, 2116, 4566, 2287, 1158, 2330, 4826, 4622, 4740, 724, 4700, 725, 1159, 5013, 4894, 726, 2434, 1953, 1160, 1201, 727, 3787, 2046, 1161, 728, 729, 2485, 2044, 4568, 3747, 730, 731, 2024, 1846, 2507, 2368, 2019, 2333, 3815, 2005, 2266, 1964, 2347, 2385, 732, 2177, 2059, 4958, 1822, 4815, 1262, 2094, 4480, 1537, 1291, 2419, 1318, 2283, 4976, 4294, 2486, 4926, 1582, 2162, 733, 4587, 734, 735, 3439, 2833, 4287, 4509, 4505, 4267, 3697, 3272, 4112, 2967, 3651, 1991, 1805, 1628, 3705, 2479, 736, 1195, 4863, 1163, 3859, 1164, 2394, 1165, 2355, 2351, 4679, 4835, 2259, 4839, 4571, 1166, 4968, 2250, 4912, 2423, 737, 1167, 4989, 4684, 4669, 4552, 4612, 2127, 1745, 1973, 4767, 1168, 2273, 2310, 3807, 4307, 1169, 2303, 1454, or 1781.

[0223] RPE Tissue-Tropic AAV VP Capsid Polypeptides. Described herein are engineered AAV VP capsid polypeptides comprising a variant 581 to 589 region predicted to confer increased RPE tissue tropism compared to a wild type AAV VP capsid polypeptide (e.g., a wild type AAV5 capsid polypeptide of SEQ ID NO: 1), generated and selected using machine learning. In some embodiments, an RPE tissue-tropic engineered AAV VP capsid polypeptide may also have tropism for choroid tissue. TABLE 9 provides 581 to 589 region sequences predicted to confer RPE tissue tropism or preference.

TABLE 9
Additional Exemplary 581 to 589
Region Sequences for RPE Targeting

| SEQ ID | |
|---|---|
| NO | 581 to 589 Region |
| 4514 | QTEFVCSGK |
| 4515 | TEINDTKST |
| 4516 | TNLPMEMIP |
| 4517 | HPDPTAEYA |
| 4518 | NHDVTPREY |
| 4519 | EPTACGVEI |
| 4520 | EAVQTAEHN |
| 4521 | DPNQCWMMN |
| 4522 | TWLELDMEC |
| 4523 | HATVFDENN |
| 4524 | TIPMHDQAK |
| 4525 | TWLDKHCVA |
| 4526 | PPTVTQCMH |
| 4527 | TVPCNGEHS |
| 4528 | NEHTDVQGE |
| 4529 | HATMCNQKS |
| 4530 | TGTVMQKAD |
| 4531 | TVPMKGMEE |
| 4532 | NMTHTQNEI |
| 4533 | DQTLCEEPP |
| 4534 | EHTIFGESG |
| 4535 | EVENKIYGH |
| 4536 | THGSVCRPD |
| 4537 | VATPECQAY |
| 4538 | GNEPDVQYN |
| 4539 | NEHSTGKAC |
| 4540 | NTDWLCDMN |
| 4541 | TNMMCNEGP |
| 4542 | EPDYKVAQP |
| 4543 | PETVGYKHC |
| 4544 | DTQFLDMVK |
| 4545 | NATMYVEER |
| 4546 | DVNPRGEAI |
| 4547 | GDNVTVEAP |
| 4548 | TITCQEARC |
| 4549 | SSHNLCCVT |
| 4550 | TATAHCMEG |
| 4551 | TPFADLCVC |
| 4552 | YTDSANNAI |
| 4553 | FQMQMHAYA |
| 4554 | TTDFAGMVQ |
| 4555 | THTCNWAEQ |
| 4556 | DALNREEAC |
| 4557 | TVENKSADA |
| 4558 | TVEMWNYCC |
| 4559 | IEPATPHCD |
| 4560 | THQNTFLTV |
| 4561 | HAVNTCEEQ |
| 4562 | MQNPFYEQT |
| 4563 | MEQKNETSG |
| 4564 | FVTDKEAVA |
| 4565 | TCTDIFHQA |
| 4566 | VTLMKDSAC |
| 4567 | ENEPGQTAC |
| 4568 | VYHCPSEED |
| 4569 | TTCWINNEG |
| 4570 | VQCVCLRNY |
| 4571 | YQDTFHEAN |
| 4572 | PEQTKACYA |
| 4573 | QATPCCEQP |
| 4574 | GNEACPKQI |
| 4575 | VEHTVCEIC |
| 4576 | TEQFAKNSA |
| 4577 | TIDVTHAAC |
| 4578 | PSTVNHCFT |
| 4579 | DHTPGGEPP |
| 4580 | TNTPASHDA |
| 4581 | TILMKHASQ |
| 4582 | EESQTVLIY |
| 4583 | SEIASHKLT |
| 4584 | HAQMQHCYV |
| 4585 | DADTWVMMC |
| 4586 | NGTSAPCML |
| 4587 | YICPSHNLN |
| 4588 | TVEIWNHDT |
| 4589 | MILTHTDVK |
| 4590 | TNLPDHMSY |
| 4591 | ATGQKEMIC |
| 4592 | NATFKNEMP |
| 4593 | NYQFCNEAA |
| 4594 | CQTVHYCPI |
| 4595 | NEVIAYCRH |
| 4596 | EFDPPNRYH |
| 4597 | TVLEMWMMC |
| 4598 | MVQATHCSI |
| 4599 | NEDVYHSEC |
| 4600 | TTVNLNREP |
| 4601 | FIPATNAGS |
| 4602 | NHDTCNEGW |
| 4603 | TNEDQHCAI |
| 4604 | PTEQTNAEA |
| 4605 | TEPGDHCEY |
| 4606 | TVDQMYAIA |
| 4607 | TMQSVNKGA |
| 4608 | NTENEAHAQ |
| 4609 | HAQNREACN |
| 4610 | TVEPTFAGY |
| 4611 | TMVQHTKSI |
| 4612 | YTFQCNAEA |
| 4613 | EAQFNSEHT |
| 4614 | NQTPGDKDG |
| 4615 | EHFNPVEYT |
| 4616 | PNEQYGNWI |
| 4617 | PPVQVGFAS |
| 4618 | TGHMNCEYY |
| 4619 | LNTVCYDKY |
| 4620 | NQTACYKWD |
| 4621 | VAYQKVEPT |
| 4622 | VTPPTNQYC |
| 4623 | NETDVEMMK |
| 4624 | EATGCNESD |
| 4625 | VATQCSAER |
| 4626 | ATVMTHSAC |
| 4627 | TEHQFAQKS |
| 4628 | YGEETSMTC |
| 4629 | TMEQTHNEY |
| 4630 | IPCPTCYGH |
| 4631 | EACDGVKIH |
| 4632 | DAQCYGLPS |
| 4633 | TIEWMNEMY |
| 4634 | ETHVQYMPD |
| 4635 | HATIRGEHQ |
| 4636 | TNEMGVERY |
| 4637 | QTQAPDCYA |
| 4638 | TWFIYCMEH |
| 4639 | NEQYCEHIT |
| 4640 | LHCCTCKEY |
| 4641 | EFHVCYADN |
| 4642 | VTDAYGYEP |
| 4643 | TQCMWDNEN |
| 4644 | TIMQMHNEG |
| 4645 | TNDPLVMEC |
| 4646 | TEHCWMYTC |
| 4647 | EFQACSKYA |
| 4648 | TIQPFMASD |
| 4649 | GLPQCNEHR |
| 4650 | NETWVVCMK |
| 4651 | THDVRCFFA |
| 4652 | VLTNEEKDC |
| 4653 | ELTFHNEYP |
| 4654 | DTVNMYLRQ |
| 4655 | EVTVWHEHN |
| 4656 | CVTAEHNWI |
| 4657 | TEHAYVKAI |
| 4658 | SETHTCYGV |
| 4659 | ATHLVQMYQ |
| 4660 | PAQAWVQTC |
| 4661 | HAQATFEVC |
| 4662 | VHNAQVEMA |
| 4663 | DVENLCAQA |
| 4664 | PETVNHKHA |
| 4665 | NTCPKANEG |
| 4666 | VTFMMNQCK |
| 4667 | VMTPPNEYC |
| 4668 | EVQIYSEAP |
| 4669 | YTDAFANEH |
| 4670 | FALCCNEPQ |
| 4671 | FVTIYAEAC |
| 4672 | IATPPDEQC |
| 4673 | DTHWLCCEV |
| 4674 | TPGEYHMEC |
| 4675 | TATVECCRW |
| 4676 | LWLFHPFAK |
| 4677 | DITPACLHA |
| 4678 | PETWLGEPC |
| 4679 | YQADCDATP |
| 4680 | QNLDKSGAC |
| 4681 | NEYVTCQGD |
| 4682 | ATQMIWMQH |
| 4683 | HATNYVIES |
| 4684 | YTCESDREA |
| 4685 | NTFNEYAWL |
| 4686 | NTLNKNAYG |
| 4687 | TVESLNCCP |
| 4688 | TMIMWYKGA |
| 4689 | FAQPVYEGQ |
| 4690 | VEEATCFVT |
| 4691 | DATMIMYYQ |
| 4692 | NHTNWCESS |
| 4693 | PTEAITCQA |
| 4694 | ASDFICKEC |
| 4695 | EDQACNHSN |
| 4696 | ETGQNHMCP |
| 4697 | TVENWGMAQ |
| 4698 | PNENQHQYL |
| 4699 | NTEIACQLK |
| 4700 | VTQNACLRN |
| 4701 | GLDAIYQMK |
| 4702 | ATVNDYLRP |
| 4703 | MPCAQHALI |
| 4704 | ESDATCCTD |
| 4705 | TWLCPVEEP |
| 4706 | HACQQVEAA |
| 4707 | VQTADMQAS |
| 4708 | TVEYLVHMP |
| 4709 | EVTCNWAQY |
| 4710 | NFQVTHKQI |
| 4711 | HNTATNDMQ |
| 4712 | LNTMMVQIK |
| 4713 | VQYQENARP |
| 4714 | TSEAPHQYK |
| 4715 | VKPEFHNLY |
| 4716 | TTTVENEMG |
| 4717 | DMQNTNHAI |
| 4718 | VETVTDAQC |
| 4719 | TMQYAWMSP |
| 4720 | NATVFEACN |
| 4721 | TATFHYAWP |
| 4722 | TPPNDKEEN |
| 4723 | TMLNSGEFN |
| 4724 | TPEVMHNTA |
| 4725 | MVHATNADS |
| 4726 | EHTVANEAS |
| 4727 | NTNADVAER |
| 4728 | HNTNWCEEY |
| 4729 | IPVTFNNET |
| 4730 | TPNPTDMEI |
| 4731 | VEQMYNEPP |
| 4732 | VNEFYHQIW |
| 4733 | LVDQKNMMQ |
| 4734 | TINEFHMQS |
| 4735 | TMCFNGEYH |
| 4736 | DEHATQCYA |
| 4737 | TVNWRGEQA |
| 4738 | VPVNPGEHK |
| 4739 | VITQTNHEG |
| 4740 | VTPWCFEAC |
| 4741 | ENTCFYHFD |
| 4742 | AINAYNEEH |
| 4743 | VAQGFANEA |
| 4744 | ATQPTPMAH |
| 4745 | TAQNVTEFD |
| 4746 | PFQQFNEAI |
| 4747 | TFHAFIQYK |
| 4748 | TMQMTDQAH |
| 4749 | ETVRTGSNC |
| 4750 | VEWACTNEQ |
| 4751 | EPCPTHKAG |
| 4752 | NSEFDVARG |
| 4753 | MVTAEWADI |
| 4754 | LVHAFYEQR |
| 4755 | ATEPPGVES |
| 4756 | VECMQHEHY |
| 4757 | TFEMFNEGP |
| 4758 | LITLCYEFH |
| 4759 | MQLPVTMRG |
| 4760 | TMDCKWMQC |
| 4761 | NACTCNNEH |
| 4762 | TNEFMWEKA |
| 4763 | HEAQYNEHI |
| 4764 | MIGVTNHAP |
| 4765 | GEFVTHNLT |
| 4766 | ATQHIYDAA |
| 4767 | YTQYEVACP |
| 4768 | MQTDHMCQK |
| 4769 | CENLGVEFK |
| 4770 | TSDVAWEGH |
| 4771 | TVTAFYEIP |
| 4772 | FQTAPHQYC |
| 4773 | TVEQCSHAG |
| 4774 | ENEPPVTVI |
| 4775 | EIQDKHEAL |
| 4776 | SNQQCEEVI |
| 4777 | SQTIACREN |
| 4778 | MQTPSHKSA |
| 4779 | TEERDGNAC |
| 4780 | TPDMKGYQP |
| 4781 | NTESKGEAC |
| 4782 | EQTVFHRLC |
| 4783 | HIDVQCEPD |
| 4784 | TPVQNHHIC |
| 4785 | PSDALTFAI |
| 4786 | EQGAFCGEP |
| 4787 | DENWGVEYS |
| 4788 | EHVQCDAID |
| 4789 | PETFAGVQA |
| 4790 | ENEMCPMMN |
| 4791 | DKELCNESC |
| 4792 | TATPHQKLA |
| 4793 | VEHCYNEGF |
| 4794 | GETVHACKI |
| 4795 | NHTPTDQIA |
| 4796 | NEFVTHYQT |
| 4797 | TNLNYFHYA |
| 4798 | MQNADMTAI |
| 4799 | TEVINEASH |
| 4800 | TPDNLHEGY |
| 4801 | TADSKVEPN |
| 4802 | VEVQCNEQT |
| 4803 | GVQCNTLMI |
| 4804 | NTLNLVAKD |
| 4805 | NTPQLHNEI |
| 4806 | APTPTCCSA |
| 4807 | TITFCYKSD |
| 4808 | IIPPDVQMK |
| 4809 | EATVINDFY |
| 4810 | DVEPLVATC |
| 4811 | VQCPLYMHP |
| 4812 | TSEQKHEAS |
| 4813 | PVTPYGEEL |
| 4814 | THPMAYKEQ |
| 4815 | YAQPCTEFP |
| 4816 | DVHAKYMAH |
| 4817 | FQTINDKSA |
| 4818 | TDHWEMKPI |
| 4819 | TNEFQNMQY |
| 4820 | GYQPWHECI |
| 4821 | DHTQLVREA |
| 4822 | EVTADNHEN |
| 4823 | TIYPAGEAQ |
| 4824 | VLDNTHNEA |
| 4825 | VATPTCYGN |
| 4826 | VTPNEYLPG |
| 4827 | TGQATEMQN |
| 4828 | VEQCLVAAC |
| 4829 | VPMQCDVDA |
| 4830 | SETVWMKHA |
| 4831 | TILVCCQAY |
| 4832 | PILFHNETP |
| 4833 | VTECPVEQP |
| 4834 | DIIQCVLVT |
| 4835 | YQAPPHATC |
| 4836 | GSDACYKFQ |
| 4837 | TIPQNTAPV |
| 4838 | TDVQGHMCI |
| 4839 | YQCPPDRHA |
| 4840 | TVLCGERIH |
| 4841 | GPTAEACFC |
| 4842 | NEQSCTAHI |
| 4843 | TNLIMCMYV |
| 4844 | TSAPYVEEP |
| 4845 | HMLIYGNYH |
| 4846 | NETDCYASA |
| 4847 | TAEMVVHCA |
| 4848 | DGTPMVRYY |
| 4849 | TQMASYAEH |
| 4850 | TEVTFNLHQ |
| 4851 | TVEMTCMMY |
| 4852 | EHLCNTKAA |
| 4853 | QHQAFHEAC |
| 4854 | PTTVFHDMP |
| 4855 | TAEMNYAIA |
| 4856 | HMTCFNEHA |
| 4857 | HHTPAGYYQ |
| 4858 | TNTPDGEDC |
| 4859 | VEEPTHSVQ |
| 4860 | TDKHGEMII |
| 4861 | VACNWGSLT |
| 4862 | TPPILCEMA |
| 4863 | YMPVNNEQI |
| 4864 | DIEFKCEHY |
| 4865 | LVLVPTDAA |
| 4866 | THLHICNPD |
| 4867 | MAQPGVFYA |
| 4868 | TITFVQEVC |
| 4869 | TDMPANASE |
| 4870 | TVLNCMEEN |
| 4871 | FQEDFYALI |
| 4872 | QTVVEHCPP |
| 4873 | EETAIPADC |
| 4874 | MQEPPDMYY |
| 4875 | TEHFHNMPK |
| 4876 | TELNRGEDI |
| 4877 | TPVWQNEGK |
| 4878 | TATIRDEDY |
| 4879 | VRDSLEART |
| 4880 | ETNACDART |
| 4881 | TIPPANEHA |
| 4882 | SATFPNEYA |
| 4883 | EPVPDYEHG |
| 4884 | AADTVHMQY |
| 4885 | VTFIEHLNQ |
| 4886 | TGLIFAEMG |
| 4887 | HVEFIGSAY |
| 4888 | TIQCPCEAY |
| 4889 | AEGVTHAII |
| 4890 | EPNVTVAAS |
| 4891 | NTVEPDNQA |
| 4892 | NWLVEWKAD |
| 4893 | TILPVYEHP |
| 4894 | VTVMIHAIC |
| 4895 | VSMQMHAKC |
| 4896 | TITFLCEED |
| 4897 | STQKCYEHG |
| 4898 | TWLVCCNKS |
| 4899 | TSTVENMDP |
| 4900 | MIEPCGMLQ |
| 4901 | TECCNGESD |
| 4902 | IATVHCMMK |
| 4903 | VTEMVHAAY |
| 4904 | NEQHTVEMR |
| 4905 | NECFKVEHD |
| 4906 | QILMKCETV |
| 4907 | HATFNCEVQ |
| 4908 | TEEMLVCPP |
| 4909 | TQHALDMAR |
| 4910 | TVFLHAHIA |
| 4911 | EEQGEKATI |
| 4912 | YSAVQDEER |
| 4913 | AWVATCNDQ |
| 4914 | EHNSTYEFD |
| 4915 | ENEMMQNDT |
| 4916 | TVLVHGMEN |
| 4917 | TTFAKNEGC |
| 4918 | TMGVQCMEC |
| 4919 | LTEPLDRAA |
| 4920 | EIDPACRHT |
| 4921 | VTCQNEAAC |
| 4922 | PFTVAYEGN |
| 4923 | ETDAFHAYA |
| 4924 | VRLNFCEFD |
| 4925 | AITDKNEGC |
| 4926 | YHCPFGMQP |
| 4927 | YAEQFTAKI |
| 4928 | ENTALNDCG |
| 4929 | DITNLCESC |
| 4930 | ERLPWVQCD |
| 4931 | SITCPGESY |
| 4932 | TDTVFPMDR |
| 4933 | DRLNFCEHC |
| 4934 | ATDAPCEYG |
| 4935 | TKLYHYMET |
| 4936 | SETCKYAIC |
| 4937 | HTVCCEFEG |
| 4938 | NTPFHDCYG |
| 4939 | FAQITEKHA |
| 4940 | MHTSLVEPC |
| 4941 | TICPFDENG |
| 4942 | AEPQKHEAC |
| 4943 | HSEQNGEPR |
| 4944 | TPQNLNHAH |
| 4945 | TVHTCLEAG |
| 4946 | GPESPVNEN |
| 4947 | EHQFTCEAC |
| 4948 | GSHAWMQVT |
| 4949 | TMQMCFKYA |
| 4950 | PILPCKEHC |
| 4951 | ATDNKNHSE |
| 4952 | TVHLCYADI |
| 4953 | ENDFINYGR |
| 4954 | TVLPNYEHA |
| 4955 | LVTNACVEI |
| 4956 | THQPFCKHA |
| 4957 | PEQWYGSAI |
| 4958 | WVTMHQCCK |
| 4959 | MEQATWECC |
| 4960 | TATFQCCYQ |
| 4961 | VQDAIYCYA |
| 4962 | ERDACLEIT |
| 4963 | TVEMFAKHY |
| 4964 | ENETHYKDI |
| 4965 | TENPFHEQP |
| 4966 | ETSKPHYGC |
| 4967 | IVTNKNECC |
| 4968 | YQTWPGRDS |
| 4969 | NIVLCNEHT |
| 4970 | ETVSTHAIY |
| 4971 | DQCATQNAI |
| 4972 | EVVQNHMIP |
| 4973 | QAVHCKEAC |
| 4974 | ENEFTCCYK |
| 4975 | EWLNNSAHA |
| 4976 | YGDAYHAST |
| 4977 | EVLACDKEG |
| 4978 | NQTDFAQQC |
| 4979 | TSENMIESP |
| 4980 | DATFQDCYA |
| 4981 | MQYQVHAAP |
| 4982 | MQTMCNDKY |
| 4983 | TPVIFNEVG |
| 4984 | ATQNIMAGN |
| 4985 | TEQMCSKYA |
| 4986 | NEQWCYKHP |
| 4987 | NYTVIHYEA |
| 4988 | FQCPSGERA |
| 4989 | YSTCPNECN |
| 4990 | TVLPMIEER |
| 4991 | THNTFGYAC |
| 4992 | TNEVTCQKT |
| 4993 | SKPPGSEQS |
| 4994 | DQHCLWEAC |
| 4995 | TNMATDEYC |
| 4996 | TEEQIGPAC |
| 4997 | TGEMFNKSS |
| 4998 | TNFQADEPR |
| 4999 | VIQQFKEAC |
| 5000 | STVSYHNEA |
| 5001 | NLLPDVERG |
| 5002 | EVQPGDKCY |
| 5003 | NEDVTPCEC |
| 5004 | TWPPWCNLI |
| 5005 | TVHACKNEF |
| 5006 | NTDWLTHEA |
| 5007 | EPDANYCYS |
| 5008 | QATSTNHDA |
| 5009 | DTQNVEMAA |
| 5010 | GLVAVHEEC |
| 5011 | PEQTCYEMT |
| 5012 | NWLDGDQAC |
| 5013 | VTTVMHAIN |

[0224] In some embodiments, an RPE tissue-tropic VP capsid polypeptide comprises a 581 to 589 region having at least 75% sequence identity to any one of SEQ ID NO: 4514-SEQ ID NO: 5013. In some embodiments, an RPE tissue-tropic VP capsid polypeptide comprises a 581 to 589 region having at least 77.7% sequence identity to any one of SEQ ID NO: 4514-SEQ ID NO: 5013. In some embodiments, an RPE tissue-tropic VP capsid polypeptide comprises a 581 to 589 region having at least 85% sequence identity to any one of SEQ ID NO: 4514-SEQ ID NO: 5013. In some embodiments, an RPE tissue-tropic VP capsid polypeptide comprises a 581 to 589 region having at least 88.8% sequence identity to any one of SEQ ID NO: 4514-SEQ ID NO: 5013. In some embodiments, an RPE tissue-tropic VP capsid polypeptide comprises a 581 to 589 region having a sequence of any one of SEQ ID NO: 4514-SEQ ID NO: 5013. In some embodiments, a retina tissue-tropic VP capsid polypeptide comprises a 581 to 589 region having one or two amino acid substitutions relative to any one of SEQ ID NO: 4514-SEQ ID NO: 5013. In some embodiments, a retina tissue-tropic VP capsid polypeptide comprises a 581 to 589 region having one or two conservative amino acid substitutions relative to any one of SEQ ID NO: 4514-SEQ ID NO: 5013.

### 581 to 589 Regions for Ocular Tissue Targeting

[0225] In some embodiments, provided herein are AAV5 VP capsid polypeptide having at least one mutation in a 581 to 589 region, corresponding to residues 581 to 589 of AAV5 VP1, wherein said at least one mutation drives increased ocular tissue tropism. In some embodiments, the at least one mutation may comprise mutating one or more amino acid residues to positively charged amino acid residues (e.g., K, R, or H). In some embodiments, the at least one mutation may comprise mutating one or more negatively charged amino acid residues (e.g., E or D) to residues that are not negatively charged. In some embodiments, the 581 to 589 region comprises a sequence having at least 75% sequence identity to any one of SEQ ID NO: 14-SEQ ID NO: 2013, SEQ ID NO: 2514-SEQ ID NO: 4513, SEQ ID NO: 2014-SEQ ID NO: 2513, or SEQ ID NO: 4514-SEQ ID NO: 5013. In some embodiments, the 581 to 589 region comprises a sequence having at least 77.7% sequence identity to any one of SEQ ID NO: 14-SEQ ID NO: 2013, SEQ ID NO: 2514-SEQ ID NO: 4513, SEQ ID NO: 2014-SEQ ID NO: 2513, or SEQ ID NO: 4514-SEQ ID NO: 5013. In some embodiments, the 581 to 589 region comprises a sequence having at least 85% sequence identity to any one of SEQ ID NO: 14-SEQ ID NO: 2013, SEQ ID NO: 2514-SEQ ID NO: 4513, SEQ ID NO: 2014-SEQ ID NO: 2513, or SEQ ID NO: 4514-SEQ ID NO: 5013. In some embodiments, the 581 to 589 region comprises a sequence having at least 88.8% sequence identity to any one of SEQ ID NO: 14-SEQ ID NO: 2013, SEQ ID NO: 2514-SEQ ID NO: 4513, SEQ ID NO: 2014-SEQ ID NO: 2513, or SEQ ID NO: 4514-SEQ ID NO: 5013. In some embodiments, the 581 to 589 region comprises a sequence of any one of SEQ ID NO: 14-SEQ ID NO: 2013, SEQ ID NO: 2514-SEQ ID NO: 4513, SEQ ID NO: 2014-SEQ ID NO: 2513, or SEQ ID NO: 4514-SEQ ID NO: 5013. In some embodiments, a retina tissue-tropic VP capsid polypeptide comprises a 581 to 589 region having one or two amino acid substitutions relative to any one of SEQ ID NO: 14-SEQ ID NO: 2013, SEQ ID NO: 2514-SEQ ID NO: 4513, SEQ ID NO: 2014-SEQ ID NO: 2513, or SEQ ID NO: 4514-SEQ ID NO: 5013. In some embodiments, a retina tissue-tropic VP capsid polypeptide comprises a 581 to 589 region having one or two conservative amino acid substitutions relative to any one of SEQ ID NO: 14-SEQ ID NO: 2013, SEQ ID NO: 2514-SEQ ID NO: 4513, SEQ ID NO: 2014-SEQ ID NO: 2513, or SEQ ID NO: 4514-SEQ ID NO: 5013.

### Numbered Embodiments

[0226] The following embodiments recite non-limiting permutations of combinations of features disclosed herein. Other permutations of combinations of features are also contemplated. In particular, each of these numbered embodiments is contemplated as depending from or relating to every previous or subsequent numbered embodiment, independent of their order as listed. 1. A viral protein (VP) capsid polypeptide comprising a 581 to 589 region corresponding to residues 581 to 589 of an AAV5 VP1 polypeptide, wherein the 581 to 589 region comprises a sequence having at least 85% sequence identity to any one of SEQ ID NO: 2014-SEQ ID NO: 2513. 2. The VP capsid polypeptide of embodiment 1, wherein the 581 to 589 region comprises a sequence of any one of SEQ ID NO: 2014-SEQ ID NO: 2513. 3. A viral protein (VP) capsid polypeptide comprising a 581 to 589 region corresponding to residues 581 to 589 of an AAV5 VP1 polypeptide, wherein the 581 to 589 region comprises a sequence having at least 85% sequence identity to any one of SEQ ID NO: 4514-SEQ ID NO: 5013. 4. The VP capsid polypeptide of embodiment 3, wherein the 581 to 589 region comprises a sequence of any one of SEQ ID NO: 4514-SEQ ID NO: 5013. 5. The VP capsid polypeptide of any one of embodiments 1-4, wherein the 581 to 589 region confers increased retinal pigment epithelium tissue-tropism compared to a wild type AAV5 VP capsid polypeptide of SEQ ID NO: 1. 6. The VP capsid polypeptide of embodiment 5, wherein the retinal pigment epithelium tissue tropism is at least 1.5-fold, at least 2-fold, at least 2.5-fold, at least 3-fold, at least 3.5-fold, at least 4-fold, at least 5-fold, at least 10-fold, at least 20-fold, at least 50-fold, at least 75-fold, at least 100-fold, at least 200-fold, or at least 500-fold higher than the wild type AAV5 VP capsid polypeptide of SEQ ID NO: 1. 7. The VP capsid polypeptide of any one of embodiments 1-6, wherein the 581 to 589 region confers increased choroid tissue-tropism compared to a wild type AAV5 VP capsid polypeptide of SEQ ID NO: 1. 8. The VP capsid polypeptide of embodiment 7, wherein the choroid tissue tropism is at least 1.5-fold, at least 2-fold, at least 2.5-fold, at least 3-fold, at least 3.5-fold, at least 4-fold, at least 5-fold, at least 10-fold, at least 20-fold, at least 50-fold, at least 75-fold, at least 100-fold, at least 200-fold, or at least 500-fold higher than the wild type AAV5 VP capsid polypeptide of SEQ ID NO: 1. 9. The VP capsid polypeptide of any one of embodiments 5-8, wherein the 581 to 589 region further confers increased retina tissue tropism compared to a wild type AAV5 VP capsid polypeptide of SEQ ID NO: 1. 10. The VP capsid polypeptide of any one of embodiments 1-9, wherein the 581 to 589 region confers decreased photoreceptor tissue-tropism compared to a wild type AAV5 VP capsid polypeptide of SEQ ID NO: 1. 11. The VP capsid polypeptide of any one of embodiments 1-10, wherein the VP capsid polypeptide comprises an amino acid sequence at least 70%, at least 80%, at least 85%, at least 90%, at least 95%, at least 97%, at least 98%, at least 98.5%, at least 99%, or at least 99.5% identical to SEQ ID NO: 1. 12. The VP capsid polypeptide of any one of embodiments 1-11, wherein the VP capsid polypeptide has a sequence of SEQ ID NO: 2, wherein residues 581 to 589 of SEQ ID NO: 2 (X¹X²X³X⁴X⁵X⁶X⁷X⁸X⁹) correspond to the 581 to 589 region. 13. The VP capsid polypeptide of any one of embodiments 1-12, wherein the VP capsid polypeptide is capable of assembling into a recombinant viral capsid. 14. The VP capsid polypeptide of any one of embodiments 1-13, comprising at least one amino acid substitution as compared to each of SEQ ID NO: 3, SEQ ID NO: 4, SEQ ID NO: 5, SEQ ID NO: 6, SEQ ID NO: 7, and SEQ ID NO: 8. 15. The VP capsid polypeptide of any one of embodiments 1-14, wherein the VP capsid polypeptide further comprises one or more mutations outside of the 581 to 589 region relative to a wild type VP capsid polypeptide of SEQ ID NO: 1. 16. The VP capsid polypeptide of any one of embodiments 1-15, wherein the 581 to 589 region confers on a recombinant viral capsid assembled from the VP capsid polypeptide improved stability compared to a wild type AAV capsid comprising a peptide of SEQ ID NO: 1. 17. The VP capsid polypeptide of any one of embodiments 1-16, wherein the 581 to 589 region confers lower toxicity upon administration to a subject compared to a wild type VP capsid polypeptide of SEQ ID NO: 1. 18. The VP capsid polypeptide of any one of embodiments 1-17, wherein the VP capsid polypeptide further comprises one or more mutations outside of the 581 to 589 region that contributes to reduced production of neutralizing antibodies relative to a wild type VP capsid polypeptide of SEQ ID NO: 1. 19. The VP capsid polypeptide of any one of embodiments 1-18, wherein the VP capsid polypeptide further comprises one or more mutations outside of the 581 to 589 region that improves manufacturability relative to a wild type VP capsid polypeptide of SEQ ID NO: 1. 20. A recombinant viral adeno-associated virus (rAAV) capsid comprising the VP capsid polypeptide of any one of embodiments 1-19, wherein the rAAV capsid preferentially targets retinal pigment epithelium tissue. 21. A recombinant viral adeno-associated virus (rAAV) capsid comprising the VP capsid polypeptide of any one of embodiments 1-19, wherein the rAAV capsid preferentially targets choroid tissue. 22. The rAAV capsid of embodiment 20 or embodiment 21, further comprising a VP2 polypeptide comprising the 581 to 589 region and a VP3 polypeptide comprising the 581 to 589 region. 23. A recombinant adeno-associated virus (rAAV), comprising the VP capsid polypeptide of any one of embodiments 1-19 assembled into a recombinant viral capsid and a payload encapsidated by the recombinant viral capsid. 24. The rAAV of embodiment 23, wherein the rAAV preferentially targets retinal pigment epithelium tissue. 25. The rAAV of embodiment 23 or embodiment 24, wherein the rAAV preferentially targets choroid tissue. 26. The rAAV of any one of embodiments 23-25, further comprising a VP2 polypeptide comprising the 581 to 589 region and a VP3 polypeptide comprising the 581 to 589 region. 27. The rAAV of any one of embodiments 23-26, wherein the payload encodes a therapeutic polynucleotide or a therapeutic peptide. 28. The rAAV of embodiment 27, wherein the payload encodes a guide RNA, a tRNA, a suppressor tRNA, a siRNA, a miRNA, an mRNA, a shRNA, a circular RNA, or an antisense oligonucleotide (ASO), a ribozyme, a DNAzyme, an aptamer, or any combination thereof. 29. The rAAV of embodiment 27, wherein the guide RNA is a CRISPR/Cas guide RNA or an ADAR guide RNA. 30. The rAAV of embodiment 27, wherein the payload encodes a component of a CRISPR/Cas system, an adenosine deaminase acting on RNA (ADAR) enzyme, a transcriptional activator, or a transcriptional repressor. 31. A pharmaceutical composition comprising the VP capsid polypeptide of any one of embodiments 1-19, the rAAV capsid of any one of embodiments 20-22, or the rAAV of any one of embodiments 23-30. 32. A method of delivering a payload to a retinal pigment epithelium tissue of a subject, the method comprising administering a recombinant adeno-associated virus (rAAV) to the subject via intravitreal administration, wherein the rAAV encapsidates the payload, and wherein the rAAV comprises a VP capsid polypeptide comprising a 581 to 589 region corresponding to residues 581 to 589 of an AAV5 VP1 polypeptide having at least 85% sequence identity to any one of SEQ ID NO: 2014-SEQ ID NO: 2513 or SEQ ID NO: 4514-SEQ ID NO: 5013. 33. A method of delivering a payload to a retinal pigment epithelium tissue of a subject, the method comprising administering a recombinant adeno-associated virus (rAAV) to the subject via intravitreal administration, wherein the rAAV encapsidates the payload, and wherein the rAAV comprises the VP capsid polypeptide of any one of embodiments 1-19. 34. A method of delivering a payload to a retinal pigment epithelium tissue of a subject, the method comprising administering a recombinant adeno-associated virus (rAAV) to the subject via intravitreal administration, wherein the rAAV encapsidates the payload, and wherein the rAAV comprises a VP capsid polypeptide comprising a 581 to 589 region corresponding to residues 581 to 589 of an AAV5 VP1 polypeptide having at least 85% sequence identity to any one of SEQ ID NO: 2014-SEQ ID NO: 2513 or SEQ ID NO: 4514-SEQ ID NO: 5013. 35. A method of delivering a payload to a choroid tissue of a subject, the method comprising administering a recombinant adeno-associated virus (rAAV) to the subject via intravitreal administration, wherein the rAAV encapsidates the payload, and wherein the rAAV comprises the VP capsid polypeptide of any one of embodiments 1-19. 36. A method of delivering a payload to a choroid tissue of a subject, the method comprising: (i) administering a recombinant adeno-associated virus (rAAV) to the subject, wherein the rAAV encapsidates the payload, and wherein the rAAV comprises a VP capsid polypeptide comprising a 581 to 589 region having at least 85% sequence identity to any one of SEQ ID NO: 2014-SEQ ID NO: 2513 or SEQ ID NO: 4514-SEQ ID NO: 5013; and (ii) delivering the payload to the choroid tissue. 37. A method of delivering a payload to a retinal pigment epithelium tissue of a subject, the method comprising: (i) administering a recombinant adeno-associated virus (rAAV) to the subject, wherein the rAAV encapsidates the payload, and wherein the rAAV comprises a VP capsid polypeptide of any one of embodiments 1-19; and (ii) delivering the payload to the retinal pigment epithelium tissue. 38. A method of delivering a payload to a choroid tissue of a subject, the method comprising: (i) administering a recombinant adeno-associated virus (rAAV) to the subject, wherein the rAAV encapsidates the payload, and wherein the rAAV comprises a VP capsid polypeptide of any one of embodiments 1-19; and (ii) delivering the payload to the choroid tissue. 39. The method of any one of embodiments 36-38, comprising administering the rAAV via intravitreal administration. 40. The method of any one of embodiments 36-38, comprising administering the rAAV via subretinal injection, topical mucosal administration, or systemic administration. 41. The method of any one of embodiments 32-40, further comprising expressing a therapeutic polypeptide or a therapeutic polynucleotide encoded by the payload. 42. The method of any one of embodiments 32-41, further comprising producing a therapeutic effect upon expression of the payload. 43. The method of embodiment 42, wherein the therapeutic effect is produced upon administration of from 1×10⁵ to 5×10¹⁴ rAAVs. 44. The method of embodiment 42 or embodiment 43, comprising administering an amount of the rAAV sufficient to produce the therapeutic effect without producing a toxicity in the subject. 45. A method of treating a condition in a subject, the method comprising administering a recombinant adeno-associated virus (rAAV) to the subject via intravitreal administration, wherein the rAAV encapsidates a payload, and wherein the rAAV comprises a VP capsid polypeptide comprising a 581 to 589 region corresponding to residues 581 to 589 of an AAV5 VP1 polypeptide having at least 85% sequence identity to any one of SEQ ID NO: 2014-SEQ ID NO: 2513 or SEQ ID NO: 4514-SEQ ID NO: 5013. 46. A method of treating a condition in a subject, the method comprising administering a recombinant adeno-associated virus (rAAV) to the subject via intravitreal administration, wherein the rAAV encapsidates a payload, and wherein the rAAV comprises the VP capsid polypeptide of any one of embodiments 1-19. 47. The method of embodiment 45 or embodiment 46, further comprising expressing the payload in a retinal pigment epithelium tissue of the subject. 48. The method of any one of embodiments 45-47, further comprising expressing the payload in a choroid tissue of the subject. 49. The method of any one of embodiments 45-48, further comprising producing a therapeutic effect in the subject. 50. A method of treating a condition in a subject, the method comprising: (i) administering a recombinant adeno-associated virus (rAAV) to the subject, wherein the rAAV encapsidates a payload, and wherein the rAAV comprises a VP capsid polypeptide comprising a 581 to 589 region corresponding to residues 581 to 589 of an AAV5 VP1 polypeptide, wherein the 581 to 589 region comprises a sequence having at least 85% sequence identity to any one of SEQ ID NO: 2014-SEQ ID NO: 2513 or SEQ ID NO: 4514-SEQ ID NO: 5013; and (ii) expressing the payload in a retinal pigment epithelium tissue of the subject, thereby treating the condition in the subject. 51. A method of treating a condition in a subject, the method comprising: (i) administering a recombinant adeno-associated virus (rAAV) to the subject, wherein the rAAV encapsidates a payload, and wherein the rAAV comprises the VP capsid polypeptide of any one of embodiments 1-19; and (ii) expressing the payload in a retinal pigment epithelium tissue of the subject, thereby treating the condition in the subject. 52. A method of treating a condition in a subject, the method comprising: (i) administering a recombinant adeno-associated virus (rAAV) to the subject, wherein the rAAV encapsidates a payload, and wherein the rAAV comprises the VP capsid polypeptide of any one of embodiments 1-19; and (ii) expressing the payload in a choroid tissue of the subject, thereby treating the condition in the subject. 53. A method of treating a condition in a subject, the method comprising: (i) administering a recombinant adeno-associated virus (rAAV) to the subject, wherein the rAAV encapsidates a payload, and wherein the rAAV comprises a VP capsid polypeptide of any one of embodiments 1-19; (ii) delivering the payload to a retinal pigment epithelium tissue of the subject; and (iii) producing a therapeutic effect in the retinal pigment epithelium tissue, thereby treating the condition. 54. A method of treating a condition in a subject, the method comprising: (i) administering a recombinant adeno-associated virus (rAAV) to the subject, wherein the rAAV encapsidates a payload, and wherein the rAAV comprises a VP capsid polypeptide of any one of embodiments 1-19; (ii) delivering the payload to a choroid tissue of the subject; and (iii) producing a therapeutic effect in the choroid tissue, thereby treating the condition. 55. The method of any one of embodiments 50-54, comprising administering the rAAV via intravitreal administration. 56. The method of any one of embodiments 50-54, comprising administering the rAAV via subretinal injection, topical mucosal administration, or systemic administration. 57. The method of any one of embodiments 45-56, wherein the condition is an ocular condition. 58. The method of embodiment 57, wherein the ocular condition is achromatopsia, macular degeneration, cataracts, choroideremia, glaucoma, optical neuropathy, Marfan syndrome, myopia, polypoidal choroidal vasculopathy, retinitis pigmentosa, Stargardt disease, Usher syndrome, Leber congenital amaurosis, Leber hereditary optical neuropathy, Uveal melanoma, or X-linked retinoschisis. 59. The method of embodiment 57 or embodiment 58, wherein the ocular condition is Stargardt disease. 60. The method of any one of embodiments 32-59, further comprising delivering the rAAV to a retinal pigment epithelium tissue with higher tissue tropism than a wild type AAV5 capsid comprising a peptide of SEQ ID NO: 1. 61. The method of any one of embodiments 39-53, further comprising delivering the rAAV to a retinal pigment epithelium tissue with higher tissue tropism than for photoreceptor tissue. 62. The method of any one of embodiments 39-54, comprising delivering the rAAV to a retinal pigment epithelium tissue with at least 2.5-fold, at least 3-fold, at least 3.5-fold, at least 4-fold, at least 5-fold, at least 10-fold, at least 20-fold, at least 50-fold, at least 75-fold, at least 100-fold, at least 200-fold, at least 500-fold higher, or at least 1000-fold higher tissue tropism than a wild type AAV5 capsid comprising a peptide of SEQ ID NO: 1. 63. The method of any one of embodiments 32-59, further comprising delivering the rAAV to a choroid tissue with higher tissue tropism than a wild type AAV5 capsid comprising a peptide of SEQ ID NO: 1. 64. The method of any one of embodiments 39-53, further comprising delivering the rAAV to a choroid tissue with higher tissue tropism than for photoreceptor tissue. 65. The method of any one of embodiments 39-54, comprising delivering the rAAV to a choroid tissue with at least 2.5-fold, at least 3-fold, at least 3.5-fold, at least 4-fold, at least 5-fold, at least 10-fold, at least 20-fold, at least 50-fold, at least 75-fold, at least 100-fold, at least 200-fold, at least 500-fold higher, or at least 1000-fold higher tissue tropism than a wild type AAV5 capsid comprising a peptide of SEQ ID NO: 1. 66. The method of any one of embodiments 39-65, comprising administering from 1×10⁵ to 5×10¹⁴ rAAVs. 67. The method of any one of embodiments 39-66, wherein the payload encodes a therapeutic protein, therapeutic polynucleotide, a guide RNA, a tRNA, a suppressor tRNA, a siRNA, a miRNA, an mRNA, a shRNA, a circular RNA, an antisense oligonucleotide (ASO), a ribozyme, a DNAzyme, an aptamer, or any combination thereof. 68. The method of embodiment 67, wherein the guide RNA is a CRISPR/Cas guide RNA or an ADAR guide RNA. 69. The method of embodiment 67, wherein the therapeutic protein is selected from the group consisting of CNGB3, NOS2A, CFH, CF, C2, C3, CFB, HTRA1/LOC, MMP-9, TIMP-3, SLC16A8, GEMIN4, CYP51A1, RIC1, TAPT1, TAF1A, WDR87, APE1, MIP, Cx50, GJA3, GJA8, CRYAA, CRYBB2, PRX, POLR3B, XRCC1, ZNF350, EPHA2, REP1, CALM2, MPP-7, Optineurin, LOX1, CYP1B1, CAV1/2, MYOC, PITX2, FOXC1, PAX6, LTBP2, Complex I, ND, OPA1, RPE65, FBN1, TGFBR2, MTHFR, MTR, MTRR, HGF, C-MET, UMODL1, MMP-1/2, CBS, IGF-1, UHRF1BP1L, PTPRR, PPFIA2, P4HA2, SERPING1, PEDF, ARMS2-HTRA1, FGD6, ABCG1, LOC387715, CETP, NRL, RDH12, PRPH2 (RDS), RHO, RPGR, SNRNP200, NR2E3, IMPDH1, CRX, HK1, IMPDH2, PRPF3, AGBL5, ABCA1, ABCA4, CRB1, USH2A, NRP1, ND4, RLBP1, PTEN, BAP1, GNAQ, GNA11, DDEF1, SF3B1, EIF1AX, CDKN2A, p14ARF, HERC2/OCA2, VEGF, and RS1. 70. The method of embodiment 67, wherein the therapeutic polynucleotide targets an mRNA encoding a protein selected from the group consisting of CNGB3, NOS2A, CFH, CF, C2, C3, CFB, HTRA1/LOC, MMP-9, TIMP-3, SLC16A8, GEMIN4, CYP51A1, RIC1, TAPT1, TAF1A, WDR87, APE1, MIP, Cx50, GJA3, GJA8, CRYAA, CRYBB2, PRX, POLR3B, XRCC1, ZNF350, EPHA2, REP1, CALM2, MPP-7, Optineurin, LOX1, CYP1B1, CAV1/2, MYOC, PITX2, FOXC1, PAX6, LTBP2, Complex I, ND, OPA1, RPE65, FBN1, TGFBR2, MTHFR, MTR, MTRR, HGF, C-MET, UMODL1, MMP-1/2, CBS, IGF-1, UHRF1BP1L, PTPRR, PPFIA2, P4HA2, SERPING1, PEDF, ARMS2-HTRA1, FGD6, ABCG1, LOC387715, CETP, NRL, RDH12, PRPH2 (RDS), RHO, RPGR, SNRNP200, NR2E3, IMPDH1, CRX, HK1, IMPDH2, PRPF3, AGBL5, ABCA1, ABCA4, CRB1, USH2A, NRP1, ND4, RLBP1, PTEN, BAP1, GNAQ, GNA11, DDEF1, SF3B1, EIF1AX, CDKN2A, p14ARF, HERC2/OCA2, VEGF, or RS1. 71. The method of embodiment 67, wherein the payload encodes a therapeutic polynucleotide targeting ABCA1, ABCA4, or CRB1 or a transgene encoding ABCA1, ABCA4, or CRB1. 72. The method of embodiment 67, wherein the payload encodes a component of a CRISPR/Cas system, an adenosine deaminase acting on RNA (ADAR) enzyme, a transcriptional activator, or a transcriptional repressor. 73. The method of embodiment 72, wherein the component of the CRISPR/Cas system comprises a Cas3, a Cas8, a Cas10, a Cas9, a Cas4, a Cas12, a Cas13, a guide RNA, or a combination thereof. 74. The method of embodiment 72, wherein the ADAR enzyme is ADAR1 or ADAR2. 75. The method of embodiment 72, wherein the transcriptional activator is VP64. 76. The method of embodiment 72, wherein the transcriptional repressor is KRAB. 77. The method of any one of embodiments 67-76, further comprising expressing a therapeutic polypeptide or a therapeutic polynucleotide encoded by the payload. 78. The method of any one of embodiments 67-77, comprising expressing the therapeutic polypeptide or the therapeutic polynucleotide at a higher level in a retinal pigment epithelium tissue compared to a wild type AAV5 capsid comprising a peptide of SEQ ID NO: 1. 79. The method of embodiment 78, comprising expressing the therapeutic polypeptide or the therapeutic polynucleotide in a retinal pigment epithelium tissue at a level that is at least 3-fold, at least 3.5-fold, at least 4-fold, at least 5-fold, at least 10-fold, at least 20-fold, at least 50-fold, at least 75-fold, at least 100-fold, at least 200-fold, at least 500-fold higher, or at least 1000-fold higher compared to the wild type AAV5 capsid. 80. The method of any one of embodiments 32-79, comprising producing a toxicity in the subject that is lower than a toxicity produced upon administration of a comparable number of wild type AAV5 capsids comprising a VP capsid polypeptide of SEQ ID NO: 1. 81. The method of any one of embodiments 32-80, comprising producing a toxicity in the subject that is lower than a toxicity produced upon administration of a number of wild type AAV5 capsids comprising a VP capsid polypeptide of SEQ ID NO: 1 sufficient to deliver a comparable number of payloads to a retinal pigment epithelium tissue. 82. The method of any one of embodiments 32-81, comprising producing a concentration of neutralizing antibodies in the subject that is lower than a concentration of neutralizing antibodies produced upon administration of a comparable number of wild type AAV5 capsids comprising a VP capsid polypeptide of SEQ ID NO: 1. 83. The method of any one of embodiments 32-82, comprising producing a concentration of neutralizing antibodies in the subject that is lower than a concentration of neutralizing antibodies produced upon administration of a comparable number of wild type AAV2 capsids. 84. The method of any one of embodiments 32-83, comprising producing a concentration of neutralizing antibodies in the subject that is lower than a concentration of neutralizing antibodies produced upon administration of a comparable number of wild type AAV8 capsids. 85. The method of any one of embodiments 32-84, comprising producing a concentration of neutralizing antibodies in the subject that is lower than a concentration of neutralizing antibodies produced upon administration of a comparable number of wild type AAV9 capsids. 86. The method of any one of embodiments 32-85, comprising producing a concentration of neutralizing antibodies in the subject that is lower than a concentration of neutralizing antibodies produced upon administration of a number of wild type AAV5 capsids comprising a VP capsid polypeptide of SEQ ID NO: 1 sufficient to deliver a comparable number of payloads to a retinal pigment epithelium tissue.

### EXAMPLES

[0227] Below are examples of specific embodiments for carrying out the present invention. The examples are offered for illustrative purposes only and are not intended to limit the scope of the present invention in any way. Efforts have been made to ensure accuracy with respect to numbers used (e.g., amounts, temperatures, etc.), but some experimental error and deviation should, of course, be allowed for.

[0228] The practice of the present invention will employ, unless otherwise indicated, conventional methods of protein chemistry, biochemistry, recombinant DNA techniques and pharmacology, within the skill of the art. Such techniques are explained fully in the literature.

### Example 1

Identification of 581 to 589 Region Sequences that Confer Ocular Tissue Tropism

[0229] This example describes identification of 581 to 589 region sequences that confer ocular tissue tropism. The high throughput capsid engineering system is schematized in FIG. 1.

[0230] Tissues were harvested and transducing capsid genes are labeled with unique molecular identifiers and barcodes. These variant sequences/unique molecular identifiers (UMIs)/barcodes were parameterized, and machine learning algorithms were used to identify deterministic features of specific tissue targeting/detargeting capsids.

[0231] FIG. 2A provides a side view (top panel) and top view (bottom panel) of key residues of known AAV capsids that have been shown to interact with target cells. FIG. 2B illustrates salient features of the AAV capsid library, showing the region of introduced diversity, with residue numbering corresponding to the numbering of amino acids in AAV5 VP1. The library plasmid includes the invariant rep and diversified cap coding sequences between AAV inverted terminal repeats (ITRs; a cis-packaging approach).

[0232] The recombinant AAV library was administered to two non-human primates (NHPs), one male and one female. The library was administered via bilateral intravitreal injection of 3.2×10¹² viral genomes in 50 μL per eye as follows. Animals were sedated/anesthetized to effect and placed in dorsal recumbency. Topical Proparacaine was applied to the eye. The conjunctival fornices were flushed with a 1:50 dilution of betadine solution/saline and the eyelid margins swabbed with undiluted 5% betadine solution. The eye was draped, and a wire eyelid speculum placed. A caliper was used to mark a spot 3.0 mm posterior to the limbus on the inferotemporal bulbar conjunctiva. The conjunctiva at the marked spot was swabbed with undiluted 5% betadine solution. Conjunctival forceps were used to fixate the globe position while a STACLEAR™ syringe with 31 g needle was inserted at the marked spot, through the sclera and advanced into the vitreous humor. The injection needle was positioned to face the posterior axis of the globe and 50 μL of AAV5 library was delivered into the vitreous by slowly depressing the syringe plunger. The needle was held in place for at least 30 seconds to lessen reflux of the injected material. Subsequently, the needle was removed and the episcleral tissues approximated to the site of insertion grasped with the conjunctival forceps to further lessen reflux of the injected material. An identical injection procedure was then performed on the contralateral eye.

[0233] Four weeks post-injection, the animals were euthanized, and tissues were collected for analysis. For the ocular dissections, both eyes first had a maximum volume of aqueous and vitreous humor collected. The retina was separated from the retinal pigment epithelium (RPE)/choroid. The RPE/choroid was frozen in liquid nitrogen as a stand-alone tissue. The retina was further dissected into 5 pieces; superior, inferior, temporal, nasal, central (including fovea and optic disc) and frozen in liquid nitrogen.

[0234] The frozen specimens were mechanically dissociated in TRIZOL™ Reagent using QIAGEN® GENTLEMACS™ as follows. Tissue was homogenized using a GENTLEMACS™ dissociator. The tissue was spun down at 3000×g for 2-3 minutes. A 15 ml MAXTRACT® QIAGEN® protocol was used to extract the AAV episomal DNA. Samples were added to MAXTRACT® High Density Tubes. Between 1 and 6 mL were added to 15 mL tubes and between 5 and 20 nM were added to 50 mL tubes, avoiding any insoluble material. In some instances, GLYCOBLUE™ was added as a co-precipitant. Lysis reagent and 0.2 mL chloroform per mL lysis reagent was added to each tube, and the tubes were capped and thoroughly mixed for at least 15 seconds to mix the organic and aqueous phases to form a pseudo-homogeneous suspension. Tubes were incubated at room temperature for 2 to 3 min. Following incubation, the samples were centrifuged at 1500×g for 5 min at 4° C. to separate the phases or until sample is completely phased (pink is no longer visible in the aqueous layer). The resulting sample contained three phases. The upper of the three phases was a colorless aqueous phase containing cellular RNA and AAV episomal DNA. The upper layer was transferred to a new tube by gently decanting into the new tube. For precipitation of RNA/episomal DNA from the aqueous phase, 0.5 mL of isopropanol was added per 1 mL of lysis reagent used previously and mixed thoroughly. The tubes were incubated at room temperature for 10 min and centrifuged at 4200×g for 10 to 15 min at 4° C. A swinging bucket rotor was used to pellet the RNA and episomal DNA to the bottom of the tube. Following centrifugation, the supernatant was carefully discarded without disrupting the pellet, which was visible as a gel-like white (or blue if co-precipitant was used) pellet at the bottom of the tube. At least 1 mL of freshly made 75% ethanol per 1 mL lysis reagent used previously was added. Samples were mixed by vortexing for a few seconds then centrifuged at 4200×g for 5 min at 4° C. The supernatant was discarded, and the remaining liquid was aspirated following a quick spin. The pellet, containing RNA, was briefly air-dried for about 5 minutes without completely drying the pellet. The RNA pellet was redissolved in 250 μL of RNase-free water prewarmed to 37° C. In some instances, the RNA was treated with 6 μL per 100 μL RNase Cocktail Enzyme Mix (THERMO FISHER SCIENTIFIC®; AM2286) at 37° C. for 30 min. to remove RNA. The treated mixture was purified with a Zymo DNA Clean and Concentrator kit-25 (D4033) following the manufacturer's protocol.

[0235] Next generation sequencing (NGS) of recovered AAV episomal DNA was performed using a semi-nested 3-round PCR amplification that appends unique molecular identifiers (UMIs) in the first round of PCR. The completed amplicon contained both UMIs and NGS adapters with dual indexes for sample demultiplexing. The first round of PCR was performed as follows. Four reactions were prepared per tissue sample. Each 100 μL PCR reaction contained 20 μL episomal DNA per reaction as a template. PCR cycling was performed (1. 98° C. for 30s; 2. 98° C. for 15s; 3. 66.6° C. annealing for 45s; 4. 72° C. for 45s; 5. Repeat steps 2-4 for 5 cycles; 6. 72° C. for 2 min). The amplified product was cleaned using CYTIVA® SERA-MAG™ Select bead clean-up following the manufacturer's protocol (1:1 bead:sample).

[0236] The second round of PCR was performed as follows. 23 μl of cleaned up PCR 1 reaction was used as a template. 2 μL of primers (10 μM) and 25 μL of 2× master mix Phusion polymerase with HF buffer (NEB, M0531L) was added per reaction. PCR cycling was performed (1. 98° C. for 30s; 2. 98° C. for 10s; 3. 62° C. for 30s; 4. 72° C. for 20s; 5. Repeat steps 2-4 for 18 cycles; 6. 72° C. for 5 min; 7. 4° C. hold). The amplified product was cleaned using CYTIVA® SERA-MAG™ Select bead clean-up following the manufacturer's protocol (0.75:1 bead:sample).

[0237] Quantitative PCR (qPCR) with SYBR was performed as follows. 4 μL of cleaned up PCR 2 reaction was used as a template. 1 μL of primers at 20 μL of master mix (containing SYBR) was added. PCR cycling was performed (1. 98° C. for 30s; 2. 98° C. for 10s; 3. 72° C. for 20s and plate read; 4. Repeat steps 2 and 3 for 29 more times; 5. 72° C. for 5m). Amplification and cycle threshold (Ct) values were recorded. Following determination of Ct values, qPCR was repeated as described above but with endpoint at 3-4 cycles above Ct value for each sample. The amplified product was cleaned using CYTIVA® SERA-MAG™ Select bead clean-up following the manufacturer's protocol (1.25:1 bead:sample).

[0238] The libraries were pooled and checked for quality. Presence of a 296 bp band for each sample was verified by gel electrophoresis. Samples were quantified on a QUBIT™ flex with High Sensitivity reagents, pooling equal amounts (in ng) together. A TAPESTATION™ automated electrophoresis system was used to confirm quality and quantify each pool. Samples were sequenced on an ISEQ™ for pooling and quality control of indexes. In some instances, depending on library diversity and depth of sequence desired, sequencing was performed on an ILLUMINA® HISEQ™ or NOVASEQ™.

[0239] To isolate the capsid variant sequence to use for all analyses, raw demultiplexed data were processed using the following procedure executed using NEXTFLOW™ and custom PYTHON® scripts. Paired end sequencing reads were merged using Fastp v0.21.0 and the following parameters: --correction -merge -average_qual 30. This removed reads with an average sequencing quality score <Q30 and corrected base calls using the read with the higher Phred quality score at that position. Capsid variant sequences were extracted by aligning with zero mismatches in the five nucleotide sequences flanking the variant sequence, and UMI sequences were isolated as the first 12 nucleotides of the read. Extracted variant sequences were then conservatively clustered within an edit distance of four to collapse/suppress error. The sequence at the center of each cluster (i.e., the consensus sequence) was then translated into its amino acid sequence, and data were filtered respect to sequence quality and abundance. Sequences were removed if containing one of the codons excluded from library synthesis (‘CTC’, ‘CTA’, ‘TTA’, ‘AGG’, ‘CGA’, ‘CGT’, ‘TAA’, ‘TAG’, ‘TGA’).

[0240] Analysis was performed using the R programming language, and the number of unique variant sequences within each tissue was determined, as shown in FIG. 4. Number of viral genomes recovered per mg from each tissue is shown in FIG. 3.

[0241] Enrichment of amino acid residues at each position in the 581 to 589 region (AAV5 VP1 581-589) was determined for the retina in comparison to various background amino acid frequencies, including all other eye tissues (FIG. 5A and FIG. 5B) or the aqueous/vitreous humor (FIG. 5C and FIG. 5D). FIG. 6A and FIG. 6B show heatmaps of amino acid enrichment and depletion at each residue position of the 581 to 589 region (581 to 589, corresponding to positions in the AAV5 VP1 sequence) for the two NHPs, as fold increased/decreased over the input viral library frequency (“ST2”). As seen in FIG. 5A-FIG. 5D, FIG. 6A, and FIG. 6B, positively charged amino acid residues (e.g., K and R) are favored for retinal tissue tropism.

### Example 2

AAV5 Variants with Tissue Tropism in Eye Tissues

[0242] This example describes engineered AAV5 variants with ocular tissue tropism that are discovered using the methods and systems described in EXAMPLE 1.

[0243] Positively charged residues, including lysine (K), arginine (R), and histidine (H), were identified as promoting ocular tissue tropism when included in the VP capsid polypeptide 581 to 589 region. Accordingly, an ocular tissue-tropic VP capsid polypeptide may comprise a K, R, or H amino acid residue at one or more of X¹, X², X³, X⁴, X⁵, X⁶, X⁷, X⁸, or X⁹ of SEQ ID NO: 2. Conversely, negatively charged residues, including aspartic acid (D) and glutamic acid (E), were identified as disfavoring ocular tissue tropism when included in the VP capsid polypeptide 581 to 589 region. Accordingly, an ocular tissue-tropic VP capsid polypeptide may comprise fewer D or E amino acid residues in the 581 to 589 region than a wild type VP capsid polypeptide (e.g., SEQ ID NO: 1), or D and E residues may be excluded from the 581 to 589 region entirely.

[0244] The present disclosure, thus, provides for rAAVs composed of engineered AAV5 VP1 capsid polypeptides having a SEQ ID NO: 2, wherein the X¹, X², X³, X⁴, X⁵, X⁶, X⁷, X⁸, and X⁹ are independently selected from A, R, N, D, C, E, Q, G, H, I, L, K, M, F, P, S, T, W, Y, and V. Also encompassed herein are rAAVs composed of engineered AAV5 VP2 capsid polypeptides and engineered AAV5 VP3 capsid polypeptides having the 581 to 589 regions described herein at the regions in AAV5 VP2 (amino acid residues 445 to 453) and AAV5 VP3 (amino acid residues 389 to 397) corresponding to the amino acids in the AAV5 VP1 581 to 589 region.

[0245] From the primary screen described in EXAMPLE 1, certain generalizable trends were also observed for AAV5 variants with ocular tissue tropism. The presence of basic amino acid residues, including K, R, and H, in the 581 to 589 region was favorable for retina tissue tropism and enhanced capsid preference for retina tissue. Increasing the number of basic amino acid residues in the 581 to 589 region increased capsid preference for retina tissue. Basic residues had the largest favorable impact on retina tissue tropism when positioned at position X³ of the 581 to 589 region, with reference to SEQ ID NO: 2, followed by positions X⁶, X¹, and X⁴, in order of impact. Conversely, the presence of acidic amino acid residues, including D and E, in the 581 to 589 region was unfavorable for retina tissue tropism and decreased capsid preference for retina tissue. Furthermore, capsids with 581 to 589 regions containing two or more basic amino acid residues exhibited greater preference for retina tissue with fewer acidic amino acid residues. Increasing the number of acidic amino acid residues in a 581 to 589 region decreased preference for retina tissue in capsids with 581 to 589 regions containing two or more basic amino acid residues.

### Example 3

### Selection of Prospective Tissue-Tropic Capsid Variants for Secondary Screen

[0246] This example describes the selection of prospective tissue-tropic capsid variants for secondary screening. Prospective retinal pigment epithelium (RPE) tissue-tropic and retinal tissue-tropic AAV5 capsid polypeptide variants were identified using the primary screen described in EXAMPLE 1. An AAV5 capsid polypeptide variant was identified as a prospective tissue-tropic variant if it was found only in that tissue of a non-human primate (NHP) following intravitreal administration. Of the 218,937 AAV5 capsid polypeptide variants identified in retinal tissue, 218,803 AAV5 capsid polypeptide variants were found exclusively in retinal tissue, as shown in FIG. 7. From those variants, 1156 were found exclusively in retinal tissue across multiple replicates, of which 724 were found exclusively in retinal tissue in multiple NHPs. Prospective retinal tissue-tropic variants were prioritized for inclusion in the secondary screen if they were observed multiple times in retinal tissue. As shown in FIG. 8, variants with multiple observations (“y”), either in multiple NHPs or multiple replicates within a particular NHP, had higher predictive probabilities (“retina_score”) of exhibiting retina-specific tropism compared to variants having a single observation (“n”), thus providing additional support for their inclusion in the secondary screen. Sequences found exclusively in retinal tissue across multiple replicates, corresponding to AAV5 capsid polypeptide variants with 581 to 589 regions having sequences of SEQ ID NO: 738-SEQ ID NO: 1169, were selected as prospective retinal tissue-tropic AAV5 capsid polypeptide variants for inclusion in the secondary screen. Sequences found exclusively in retinal tissue across multiple NHPs, corresponding to AAV5 capsid polypeptide variants with 581 to 589 regions having sequences of SEQ ID NO: 14-SEQ ID NO: 737, were selected as prospective retinal tissue-tropic AAV5 capsid polypeptide variants for inclusion in the secondary screen. Additionally, observed tissue-unique prospective retina tissue-tropic AAV5 capsid polypeptide variants with 581 to 589 regions having sequences of SEQ ID NO: 1170-SEQ ID NO: 2013 were selected using machine learning for inclusion in the secondary screen. A total of 724 tissue-unique prospective retina tissue-tropic variants observed in multiple NHP were included in the secondary screen. A total of 432 tissue-unique prospective retina tissue-tropic variants observed in multiple replicates were included in the secondary screen. A total of 844 other observed prospective retina tissue-tropic variants, top-ranked by machine learning, but only observed in one replicate of one NHP, were included in the secondary screen.

[0247] As shown in FIG. 7, 2069 AAV5 capsid polypeptide variants were identified in RPE tissue and 2065 AAV5 capsid polypeptide variants were identified exclusively in RPE tissue. Observed RPE tissue-tropic AAV5 capsid polypeptide variants with 581 to 589 regions having sequences of SEQ ID NO: 2014-SEQ ID NO: 2513 were selected using machine learning for inclusion in the secondary screen. A total of 500 top ML-ranked tissue-unique prospective RPE tissue-tropic variants, having high predictive probability of being RPE-tropic and low predictive probability of being retina-tropic, were included in the secondary screen.

[0248] Additional prospective RPE tissue-tropic and retinal tissue-tropic engineered AAV5 capsid polypeptides to be included in the secondary screen were selected based on a machine learning analysis of the results of the primary screen performed in EXAMPLE 1. Synthetic AAV5 capsid polypeptide variants predicted to have retina tissue tropism or RPE tissue tropism were produced using input optimization through generative convolutional neural network (CNN) modeling; by sampling position weight matrices (PWMs) of amino acid frequencies for a tissue; or by sampling a uniform distribution of amino acid frequencies. These variants were then scored using the machine learning models trained using the observed capsid variants, with the top ML-ranked variants being selected for inclusion in the secondary screen. For retina tissue, synthetic sequences identified using input optimization had the highest predictive probabilities (“Average ML Score”) of having retina-specific tropism, as shown in FIG. 9. FIG. 9 shows the distributions of predicted probabilities of all variants with multiple observations in multiple NHPs or multiple replicates compared to all synthetic retina-tropic variants generated by machine learning, before secondary screen selection. FIG. 10 shows the distributions of predicted probabilities of the variants selected for inclusion in the secondary screen, categorized by how the variant was identified.

[0249] AAV5 capsid polypeptide variants with 581 to 589 regions having sequences of SEQ ID NO: 2514-SEQ ID NO: 3575 were generated using convolutional neural network (CNN) input optimization as prospective retina tissue-tropic and selected for inclusion in the secondary screen. AAV5 capsid polypeptide variants with 581 to 589 regions having sequences of SEQ ID NO: 3576-SEQ ID NO: 4510 were generated by sampling PWMs, followed by scoring these sequences and selecting high-ranking sequences as prospective retina tissue-tropic for inclusion in the secondary screen. AAV5 capsid polypeptide variants with 581 to 589 regions having sequences of SEQ ID NO: 4511-SEQ ID NO: 4513 were generated by sampling a uniform distribution, followed by scoring these sequences as retina tissue-tropic for inclusion in the secondary screen. When selecting sequences for further screening, variants generated from sampling PWMs and variants generated from sampling a uniform distribution were considered together. A total of 2000 synthetic prospective retina tissue-tropic variants were included in the secondary screen, including 1062 input optimized sequences, 935 sequences from sampling PWMs, and 3 sequences identified from uniform distribution sampling.

[0250] AAV5 capsid polypeptide variants with 581 to 589 regions having sequences of SEQ ID NO: 4514-SEQ ID NO: 5013 were generated by sampling PWMs, followed by scoring these sequences and selecting high-ranking sequences as prospective RPE tissue-tropic for inclusion in the secondary screen. A total of 500 synthetic prospective RPE tissue-tropic variants were included in the secondary screen.

### Example 4

### Secondary Screen to Identify Ocular Tissue-Tropic Engineered AAV Capsids

[0251] This example describes a secondary screen to identify ocular tissue-tropic engineered AAV capsids. Prospective tissue-tropic capsids identified from an in vivo primary screen, through machine learning, or both, such as the retina tissue-tropic and RPE tissue-tropic capsids identified in EXAMPLE 3, are introduced into an in vivo secondary screen to confirm tissue-tropic behavior of the identified capsids. The secondary screen includes capsids observed in the primary screen in RPE, choroid, retina, or combinations thereof. The barcoded secondary screen capsid library, including wild type AAV controls, is injected into a non-human primate (NHP) by intravitreal injection. Following injection, ocular tissues, including RPE/choroid, retina, vitreous humor, aqueous humor, and optic nerve, are isolated from the NHP, and the barcoded sequences are quantified. RPE and choroid tissues are isolated and analyzed together.

[0252] To identify RPE-targeting capsids in the functional screen, two versions of every candidate capsid in the library are encoded. The first version includes a payload sequence under transcriptional control of a universal promoter (e.g., CAG). The second version includes a payload sequence under transcriptional control of an RPE-specific promoter (e.g., BEST1). Capsids that infect RPE will show RNA expression from both the RPE-specific and universal promoters, whereas capsids infecting other cells will show expression from the CAG promoter and lack expression from the BEST1 promoter. Capsids found in RPE/choroid tissue that express from both the RPE-specific and universal promoters are identified as RPE tissue-tropic capsids. Capsids found in retina tissue are identified as retina tissue-tropic capsids.

### Example 5

Treatment of an Eye Disease or Condition with an AAV5-Derived Virion Encapsidating a Therapeutic Payload

[0253] This example describes treatment of an ocular disease or condition with a variant AAV5-derived virion having any one of the engineered ocular tissue-tropic variant AAV5 VP capsid polypeptides disclosed herein, wherein the variant AAV5 virion encapsidates a therapeutic payload. Polynucleotide sequence encoding for AAV Rep, an AAV5-derived variant Cap and helper proteins and a therapeutic payload are transfected in cells to produce variant AAV5 virions, where the polynucleotide sequence encoding for the variant AAV5 Cap comprises at least one mutation in a 581 to 589 region, corresponding to residues 581 to 589 in the VP1 capsid polypeptide, and where the polynucleotide sequence encodes for a variant AAV5 Cap comprising a 581 to 589 region that confers retinal tissue tropism, photoreceptor cell targeting, retinal pigment epithelial cell targeting, or combinations thereof. The 581 to 589 region has a sequence of any one of SEQ ID NO: 14-SEQ ID NO: 2013, SEQ ID NO: 2514-SEQ ID NO: 4513, SEQ ID NO: 2014-SEQ ID NO: 2513, or SEQ ID NO: 4514-SEQ ID NO: 5013. Each such variant is detargeted for vitreous humor and aqueous humor. The therapeutic payload is a guide RNA or miRNA targeting an mRNA encoded for by a gene implicated in the ocular disease or condition, or the therapeutic payload is a transgene. The variant AAV5 virion encapsidating the payload is administered to a subject. The subject is a human or non-human animal. The route of administration is an intravitreal route of administration. The intravitreal route of administration is intravitreal injection. Upon administration to the subject, the variant AAV5 virions encapsidating the therapeutic payload exhibit enhanced ocular tissue tropism as compared to wild type AAV5 virions encapsidating the therapeutic payload. Upon administration to the subject, a lower dose of the variant AAV5 virions encapsidating the therapeutic payload is administered as compared to wild type AAV5 virions encapsidating the therapeutic payload. Upon administration to the subject, at least one symptom of the ocular disease or condition is alleviated, or the subject is cured.

### Example 6

Treatment of Macular Degeneration with an AAV5-Derived Virion Encapsidating a Therapeutic Payload

[0254] This example describes treatment of wet age-related macular degeneration with a variant AAV5-derived virion having any one of the engineered ocular tissue-tropic variant AAV5 VP capsid polypeptides disclosed herein, wherein the variant AAV5 virion encapsidates a therapeutic payload. Polynucleotide sequence encoding for AAV Rep, an AAV5-derived variant Cap and helper proteins and a therapeutic payload are transfected in cells to produce variant AAV5 virions, where the polynucleotide sequence encoding for the variant AAV5 Cap comprises at least one mutation in a 581 to 589 region, corresponding to residues 581 to 589 in the VP1 capsid polypeptide, and where the polynucleotide sequence encodes for a variant AAV5 Cap comprising a 581 to 589 region conferring retinal tissue targeting, retinal pigment epithelial cell targeting, or both. The 581 to 589 region has a sequence of any one of SEQ ID NO: 14-SEQ ID NO: 2013, SEQ ID NO: 2514-SEQ ID NO: 4513, SEQ ID NO: 2014-SEQ ID NO: 2513, or SEQ ID NO: 4514-SEQ ID NO: 5013. Each such variant is detargeted for vitreous humor and aqueous humor. The therapeutic payload is a guide RNA targeting an mRNA encoded for by a gene implicated in wet age-related macular degeneration, or the therapeutic payload is a transgene. The mRNA targeted by the guide RNA is an mRNA encoded for by a NOS2A, CFH, CF, C2, C3, CFB, HTRA1/LOC, MMP-9, TIMP-3, or SLC16A8 gene. The transgene is a gene encoding for an anti-VEGF antibody. The variant AAV5 virion encapsidating the payload is administered to a subject. The subject is a human or non-human animal. The route of administration is an intravitreal route of administration. The intravitreal route of administration is intravitreal injection. Upon administration to the subject, the variant AAV5 virions encapsidating the therapeutic payload exhibit enhanced ocular tissue tropism compared with wild type AAV5 virions encapsidating the therapeutic payload. Upon administration to the subject, a lower dose of the variant AAV5 virions encapsidating the therapeutic payload is administered as compared to wild type AAV5 virions encapsidating the therapeutic payload. Upon administration to the subject, at least one symptom of wet age-related macular degeneration is alleviated, or the subject is cured.

### Example 7

Treatment of Glaucoma with an AAV5-Derived Virion Encapsidating a Therapeutic Payload

[0255] This example describes treatment of glaucoma with a variant AAV5-derived virion having any one of the engineered ocular tissue-tropic variant AAV5 VP capsid polypeptides disclosed herein, wherein the variant AAV5 virion encapsidates a therapeutic payload. Polynucleotide sequence encoding for AAV Rep, an AAV5-derived variant Cap and helper proteins and a therapeutic payload are transfected in cells to produce variant AAV5 virions, where the polynucleotide sequence encoding for the variant AAV5 Cap comprises at least one mutation in a 581 to 589 region, corresponding to residues 581 to 589 in the VP1 capsid polypeptide, and where the polynucleotide sequence encodes for a variant AAV5 Cap comprising a 581 to 589 region that confers retinal tissue targeting, retinal pigment epithelial cell targeting, or both. The 581 to 589 region has a sequence of any one of SEQ ID NO: 14-SEQ ID NO: 2013, SEQ ID NO: 2514-SEQ ID NO: 4513, SEQ ID NO: 2014-SEQ ID NO: 2513, or SEQ ID NO: 4514-SEQ ID NO: 5013. Each such variant is detargeted for vitreous humor and aqueous humor. The therapeutic payload is a guide RNA targeting an mRNA encoded for by a gene implicated in glaucoma, or the therapeutic payload is a transgene. The mRNA targeted by the guide RNA is an mRNA encoded for by a CALM2, MPP-7, Optineurin, LOX1, CYP1B1, CAV1/2, MYOC, PITX2, FOXC1, PAX6, CYP1B1, or LTBP2 gene. The transgene is optineurin. The variant AAV5 virion encapsidating the payload is administered to a subject. The subject is a human or non-human animal. The route of administration is an intravitreal route of administration. The intravitreal route of administration is intravitreal injection. Upon administration to the subject, the variant AAV5 virions encapsidating the therapeutic payload exhibit enhanced ocular tissue tropism as compared to wild type AAV5 virions encapsidating the therapeutic payload. Upon administration to the subject, a lower dose of the variant AAV5 virions encapsidating the therapeutic payload is administered as compared to wild type AAV5 virions encapsidating the therapeutic payload. Upon administration to the subject, at least one symptom of glaucoma is alleviated, or the subject is cured.

### Example 8

Treatment of Retinitis Pigmentosa with an AAV5-Derived Virion Encapsidating a Therapeutic Payload

[0256] This example describes treatment of retinitis pigmentosa with a variant AAV5-derived virion having any one of the engineered ocular tissue-tropic variant AAV5 VP capsid polypeptides disclosed herein, wherein the variant AAV5 virion encapsidates a therapeutic payload. Polynucleotide sequence encoding for AAV Rep, an AAV5-derived variant Cap and helper proteins and a therapeutic payload are transfected in cells to produce variant AAV5 virions, where the polynucleotide sequence encoding for the variant AAV5 Cap comprises at least one mutation in a 581 to 589 region, corresponding to residues 581 to 589 in the VP1 capsid polypeptide, and where the polynucleotide sequence encodes for a variant AAV5 Cap comprising a 581 to 589 region that confers retinal tissue targeting, retinal pigment epithelial cell targeting, or both. The 581 to 589 region has a sequence of any one of SEQ ID NO: 14-SEQ ID NO: 2013, SEQ ID NO: 2514-SEQ ID NO: 4513, SEQ ID NO: 2014-SEQ ID NO: 2513, or SEQ ID NO: 4514-SEQ ID NO: 5013. Each such variant is detargeted for vitreous humor and aqueous humor. The therapeutic payload is a guide RNA targeting an mRNA encoded for by a gene implicated in the retinitis pigmentosa, or the therapeutic payload is a transgene. The mRNA targeted by the guide RNA is an mRNA encoded for by a NRL, RDH12, PRPH2 (RDS), RHO, RPGR, SNRNP200, NR2E3, IMPDH1, CRX, HK1, IMPDH2, SNRNP200, PRPF3, or AGBL5 gene. The transgene is a NRL, RDH12, PRPH2 (RDS), RHO, RPGR, SNRNP200, NR2E3, IMPDH1, CRX, HK1, IMPDH2, SNRNP200, PRPF3, or AGBL5 gene. The variant AAV5 virion encapsidating the payload is administered to a subject. The subject is a human or non-human animal. The route of administration is an intravitreal route of administration. The intravitreal route of administration is intravitreal injection. Upon administration to the subject, the variant AAV5 virions encapsidating the therapeutic payload exhibit enhanced ocular tissue tropism as compared with wild type AAV5 virions encapsidating the therapeutic payload. Upon administration to the subject, a lower dose of the variant AAV5 virions encapsidating the therapeutic payload is administered as compared to wild type AAV5 virions encapsidating the therapeutic payload. Upon administration to the subject, at least one symptom of the retinitis pigmentosa is alleviated, or the subject is cured.

### Example 9

Treatment of Stargardt Disease with an AAV5-Derived Virion Encapsidating a Therapeutic Payload

[0257] This example describes treatment of Stargardt disease with a variant AAV5-derived virion having any one of the engineered ocular tissue-tropic variant AAV5 VP capsid polypeptides disclosed herein, wherein the variant AAV5 virion encapsidates a therapeutic payload. Polynucleotide sequence encoding for AAV Rep, an AAV5-derived variant Cap and helper proteins and a therapeutic payload are transfected in cells to produce variant AAV5 virions, where the polynucleotide sequence encoding for the variant AAV5 Cap comprises at least one mutation in a 581 to 589 region, corresponding to residues 581 to 589 in the VP1 capsid polypeptide, and where the polynucleotide sequence encodes for a variant AAV5 Cap comprising a 581 to 589 region conferring retinal tissue targeting, retinal pigment epithelial cell targeting, or both. The 581 to 589 region has a sequence of any one of SEQ ID NO: 14-SEQ ID NO: 2013, SEQ ID NO: 2514-SEQ ID NO: 4513, SEQ ID NO: 2014-SEQ ID NO: 2513, or SEQ ID NO: 4514-SEQ ID NO: 5013. Each such variant is detargeted for vitreous humor and aqueous humor. The therapeutic payload is a guide RNA targeting an mRNA encoded for by a gene implicated in Stargardt disease, or the therapeutic payload is a transgene. The mRNA targeted by the guide RNA is an mRNA encoded for by an ABCA1, ABCA4, or CRB1 gene. The transgene is ABCA1, ABCA4, or CRB1. The variant AAV5 virion encapsidating the payload is administered to a subject. The subject is a human or non-human animal. The route of administration is an intravitreal route of administration. The intravitreal route of administration is intravitreal injection. Upon administration to the subject, the variant AAV5 virions encapsidating the therapeutic payload exhibit enhanced ocular tissue tropism as compared wild type AAV5 virions encapsidating the therapeutic payload. Upon administration to the subject, a lower dose of the variant AAV5 virions encapsidating the therapeutic payload is administered as compared to wild type AAV5 virions encapsidating the therapeutic payload. Upon administration to the subject, at least one symptom of Stargardt disease is alleviated, or the subject is cured.

### Example 10

Treatment of Uveal Melanoma with an AAV5-Derived Virion Encapsidating a Therapeutic Payload

[0258] This example describes treatment of uveal melanoma with a variant AAV5-derived virion having any one of the engineered ocular tissue-tropic variant AAV5 VP capsid polypeptides disclosed herein, wherein the variant AAV5 virion encapsidates a therapeutic payload. Polynucleotide sequence encoding for AAV Rep, an AAV5-derived variant Cap and helper proteins and a therapeutic payload are transfected in cells to produce variant AAV5 virions, where the polynucleotide sequence encoding for the variant AAV5 Cap comprises at least one mutation in a 581 to 589 region, corresponding to residues 581 to 589 in the VP1 capsid polypeptide, and where the polynucleotide sequence encodes for a variant AAV5 Cap comprising a 581 to 589 region that confers retinal tissue targeting, retinal pigment epithelial cell targeting, or both. The 581 to 589 region has a sequence of any one of SEQ ID NO: 14-SEQ ID NO: 2013, SEQ ID NO: 2514-SEQ ID NO: 4513, SEQ ID NO: 2014-SEQ ID NO: 2513, or SEQ ID NO: 4514-SEQ ID NO: 5013. Each such variant is detargeted for vitreous humor and aqueous humor. The therapeutic payload is a guide RNA targeting an mRNA encoded for by a gene implicated in uveal melanoma, or the therapeutic payload is a transgene. The mRNA targeted by the guide RNA is an mRNA encoded for by a PTEN, BAP1, GNAQ, GNA11, DDEF1, SF3B1, EIF1AX, CDKN2A, p14ARF, a HERC2/OCA2 gene. The transgene is an anti gp100 protein. The variant AAV5 virion encapsidating the payload is administered to a subject. The subject is a human or non-human animal. The route of administration is an intravitreal route of administration. The intravitreal route of administration is intravitreal injection. Upon administration to the subject, the variant AAV5 virions encapsidating the therapeutic payload exhibit enhanced ocular tissue tropism as compared to wild type AAV5 virions encapsidating the therapeutic payload. Upon administration to the subject, a lower dose of the variant AAV5 virions encapsidating the therapeutic payload is administered as compared to wild type AAV5 virions encapsidating the therapeutic payload. Upon administration to the subject, at least one symptom of uveal melanoma is alleviated, a tumor size is reduced, or the subject is cured.

### Example 11

Treatment of Optical Neuropathy with an AAV5-Derived Virion Encapsidating a Therapeutic Payload

[0259] This example describes treatment of optical neuropathy with a variant AAV5-derived virion having any one of the engineered ocular tissue-tropic variant AAV5 VP capsid polypeptides disclosed herein, wherein the variant AAV5 virion encapsidates a therapeutic payload. Polynucleotide sequence encoding for AAV Rep, an AAV5-derived variant Cap and helper proteins and a therapeutic payload are transfected in cells to produce variant AAV5 virions, where the polynucleotide sequence encoding for the variant AAV5 Cap comprises at least one mutation in a 581 to 589 region, corresponding to residues 581 to 589 in the VP1 capsid polypeptide, and where the polynucleotide sequence encodes for a variant AAV5 Cap comprising a 581 to 589 region that confers retinal tissue targeting, retinal pigment epithelial cell targeting, or both. The 581 to 589 region has a sequence of any one of SEQ ID NO: 14-SEQ ID NO: 2013, SEQ ID NO: 2514-SEQ ID NO: 4513, SEQ ID NO: 2014-SEQ ID NO: 2513, or SEQ ID NO: 4514-SEQ ID NO: 5013. Each such variant is detargeted for vitreous humor and aqueous humor. The therapeutic payload is a guide RNA targeting an mRNA encoded for by a gene implicated in optical neuropathy, or the therapeutic payload is a transgene. The mRNA targeted by the guide RNA is an mRNA encoded for by a Complex I, ND, OPA1, or RPE65 gene. The transgene is Complex I, ND, OPA1, or RPE65. The variant AAV5 virion encapsidating the payload is administered to a subject. The subject is a human or non-human animal. The route of administration is an intravitreal route of administration. The intravitreal route of administration is intravitreal injection. Upon administration to the subject, the variant AAV5 virions encapsidating the therapeutic payload exhibit enhanced ocular tissue tropism as compared to wild type AAV5 virions encapsidating the therapeutic payload. Upon administration to the subject, a lower dose of the variant AAV5 virions encapsidating the therapeutic payload is administered as compared to wild type AAV5 virions encapsidating the therapeutic payload. Upon administration to the subject, at least one symptom of ocular neuropathy is alleviated, or the subject is cured.

### Example 12

Treatment of Usher Syndrome with an AAV5-Derived Virion Encapsidating a Therapeutic Payload

[0260] This example describes treatment of Usher syndrome with a variant AAV5-derived virion having any one of the engineered ocular tissue-tropic variant AAV5 VP capsid polypeptides disclosed herein, wherein the variant AAV5 virion encapsidates a therapeutic payload. Polynucleotide sequence encoding for AAV Rep, an AAV5-derived variant Cap and helper proteins and a therapeutic payload are transfected in cells to produce variant AAV5 virions, where the polynucleotide sequence encoding for the variant AAV5 Cap comprises at least one mutation in a 581 to 589 region, corresponding to residues 581 to 589 in the VP1 capsid polypeptide, and where the polynucleotide sequence encodes for a variant AAV5 Cap comprising a 581 to 589 region that confers retinal tissue targeting, retinal pigment epithelial cell targeting, or both. The 581 to 589 region has a sequence of any one of SEQ ID NO: 14-SEQ ID NO: 2013, SEQ ID NO: 2514-SEQ ID NO: 4513, SEQ ID NO: 2014-SEQ ID NO: 2513, or SEQ ID NO: 4514-SEQ ID NO: 5013. Each such variant is detargeted for vitreous humor and aqueous humor. The therapeutic payload is a guide RNA targeting an mRNA encoded for by a gene implicated in Usher syndrome, or the therapeutic payload is a transgene. The mRNA targeted by the guide RNA is an mRNA encoded for by a ADGRV1, CEP250, CLRN1, MYO7A, PROM1, USH1C, USH1G, or USH2A gene. The transgene is ADGRV1, CEP250, CLRN1, MYO7A, PROM1, USH1C, USH1G, or USH2A. The variant AAV5 virion encapsidating the payload is administered to a subject. The subject is a human or non-human animal. The route of administration is an intravitreal route of administration. The intravitreal route of administration is intravitreal injection. Upon administration to the subject, the variant AAV5 virions encapsidating the therapeutic payload exhibit enhanced ocular tissue tropism as compared to wild type AAV5 virions encapsidating the therapeutic payload. Upon administration to the subject, a lower dose of the variant AAV5 virions encapsidating the therapeutic payload is administered as compared to wild type AAV5 virions encapsidating the therapeutic payload. Upon administration to the subject, at least one symptom of Usher syndrome is alleviated, or the subject is cured.

### Example 13

### Singleplex Tertiary Screen to Validate Ocular Tissue-Tropic Engineered AAV Capsids

[0261] This example describes a tertiary screen, in singleplex, to identify ocular tissue-tropic engineered AAV capsids. Prospective tissue-tropic capsids identified from an in vivo secondary screen, through machine learning, or both, such as the retina tissue-tropic and RPE tissue-tropic capsids identified in EXAMPLE 4, are introduced into an in vivo tertiary screen, in singleplex, to confirm tissue-tropic behavior of the identified capsids when individually dosed in NHP. The tertiary screen includes capsids observed in the secondary screen in RPE, choroid, retina, or combinations thereof. The tertiary screen capsid library is injected into a non-human primate (NHP) by intravitreal injection. Following injection, ocular tissues, including RPE/choroid, retina, vitreous humor, aqueous humor, and optic nerve, are isolated from the NHP, and the barcoded sequences are quantified. RPE and choroid tissues are isolated and analyzed together. Prospective tissue-tropic capsids are compared to control, wild-type AAV to identify superior variant capsids of the present disclosure that target various compartments of the eye (e.g., RPE tissue-tropic capsids or retina tissue-tropic capsids).

[0262] While the invention has been particularly shown and described with reference to a preferred embodiment and various alternate embodiments, it is understood by persons skilled in the relevant art that various changes in form and details can be made therein without departing from the spirit and scope of the invention.

What is claimed is:

1. A viral protein (VP) capsid polypeptide comprising a 581 to 589 region corresponding to residues 581 to 589 of an AAV5 VP1 polypeptide,
wherein the 581 to 589 region comprises a sequence of SEQ ID NO: 5014 and further comprises at least one substitution relative to SEQ ID NO: 9; and
wherein the 581 to 589 region comprises one or more basic amino acid residues.

2. The VP capsid polypeptide of claim 1, wherein the 581 to 589 region comprises more basic amino acid residues than acidic amino acid residues.

3. The VP capsid polypeptide of claim 2, wherein the acidic amino acid residues are selected from the group consisting of D and E.

4. The VP capsid polypeptide of any one of claims 1-3, wherein the basic amino acid residues are selected from the group consisting of K, R, and H.

5. A viral protein (VP) capsid polypeptide comprising a 581 to 589 region corresponding to residues 581 to 589 of an AAV5 VP1 polypeptide, wherein the 581-589 region of the VP capsid polypeptide comprises a sequence of SEQ ID NO: 5014, wherein X¹, X², X³, X⁴, X⁵, or X⁶ of SEQ ID NO: 5014, or any combination thereof is K or R.

6. The VP capsid polypeptide of any one of claims 1-5, wherein X¹ of SEQ ID NO: 5014 is K or R.

7. The VP capsid polypeptide of claim 4, wherein the 581 to 589 region of the VP capsid polypeptide has a sequence of any one of SEQ ID NOs: 1726, 374, 1442, 933, 1748, 4142, 1434, 1358, 1191, 3732, 4110, 4039, 4411, 4506, 4270, 4156, 3780, 4036, 4030, 4016, 1550, 3899, 1247, 1855, 1181, 3919, 1639, 3664, 1244, 4140, 3930, 4117, 4189, 4001, 3799, 3643, 3619, 1240, 1686, 1479, 1307, 1575, 4296, 1665, 3871, 4135, 1605, 4408, 3604, 1274, 4149, 1313, 3741, 1938, 3709, 1727, 3893, 1280, 3622, 1784, 3834, 1752, 1983, 1743, 3979, 4461, 4113, 3817, 4232, 1340, 1489, 4214, 3902, 1857, 2510, 2316, 1904, 1219, 1486, 1512, 1481, 1516, 3820, 3789, 4252, 4047, 4330, 4082, 4094, 1574, 1248, 4078, 1872, 1426, 3785, 3687, 4318, 4243, 3866, 3704, 4172, 1621, 4315, 1192, 1513, 1856, 2476, 3324, 2769, 2678, 1561, 3296, 375, 2343, 2348, 376, 377, 1395, 1584, 4093, 4453, 3940, 3778, 4374, 4210, 4009, 4264, 4339, 4368, 1738, 378, 1610, 4194, 4474, 4013, 4266, 1771, 1759, 1922, 3860, 3832, 1349, 1381, 3663, 1642, 1185, 4356, 3932, 1233, 4212, 3858, 1198, 4192, 3611, 1919, 1819, 3790, 3712, 1969, 4095, 1887, 4468, 1720, 4247, 934, 1790, 2002, 1657, 1663, 1336, 3894, 1554, 1494, 1405, 3576, 4314, 3695, 1851, 1850, 4362, 1815, 3845, 4511, 3656, 3638, 1406, 1596, 4454, 1443, 1661, 935, 4504, 1359, 1734, 3650, 1910, 1305, 1648, 3831, 4435, 1208, 1988, 4451, 1993, 1986, 3849, 1718, 4068, 1835, 1425, 1428, 1282, 4380, 1658, 1452, 1687, 4024, 379, 4072, 3791, 4491, 4323, 4014, 1304, 1440, 1511, 1981, 1676, 1547, 4422, 1283, 3861, 1383, 3644, 3691, 4259, 1749, 1418, 1176, 4216, 1924, 1421, 1387, 3992, 4423, 4253, 1618, 1871, 1256, 3748, 4119, 1297, 1586, 1251, 1299, 1954, 4450, 3990, 4029, 4097, 3890, 3796, 1389, 3711, 4344, 1578, 1476, 4343, 1202, 4413, 4384, 3808, 1647, 1475, 3892, 3674, 1739, 3926, 3595, 1943, 3756, 4405, 3973, 4109, 4159, 3744, 4387, 1960, 4275, 3781, 1535, 1210, 4492, 4365, 4118, 3655, 3886, 4278, 4383, 4485, 1392, 3751, 3931, 3986, 3678, 1249, 4353, 4208, 3710, 4238, 4213, 3969, 4436, 3175, 4128, 2970, 1228, 3534, 3437, 3406, 3641, 3639, 3954, 4335, 3995, 3582, 4475, 3784, 4470, 4010, 3802, 3941, 4427, 4396, 4348, 3587, 3818, 3864, 3956, 3863, 3731, 3814, 4067, 4354, 4350, 4334, 3821, 1932, 3929, 4171, 1258, 3824, 3631, 4465, 4494, 1320, 1398, 3828, 1204, 1223, 1284, 1685, 3773, 4209, 3014, 4462, 4246, 4190, 4312, 4023, 3760, 3753, 1178, 3884, 2783, 4038, 3545, 2916, 3112, 2834, 3880, 3673, 4102, 4399, 4048, 3752, 4207, 1235, 3943, 4355, 4087, 4100, 4327, 4037, 4163, 3918, 4486, 1243, 3933, 4178, 1662, 1643, 4152, 3634, 3617, 4445, 4303, 1370, 3838, 4199, 4284, 1213, 4382, 1399, 1187, 3714, 1828, 4487, 3615, 1842, 1501, 3746, 4018, 4420, 3606, 4121, 3724, 3935, 1941, 4419, 4282, 1955, 1949, 4310, 4488, 1577, 4127, 1288, 1171, 3670, 4052, 3627, 3777, 936, 1371, 3685, 1325, 1940, 380, 4482, 4258, 3812, 1581, 1860, 4124, 4508, 4500, 3652, 3972, 1309, 1630, 1528, 3717, 1217, 3692, 4430, 3764, 4316, 4285, 3645, 3971, 4421, 1172, 4026, 2740, 3125, 3546, 1725, 1206, 3842, 4404, 3690, 3962, 4513, 4340, 4329, 4410, 3703, 4136, 1763, 1487, 3589, 3907, 4153, 2707, 3730, 4426, 4180, 4041, 3923, 4444, 3851, 4429, 4361, 1441, 4394, 4302, 3758, 4510, 3742, 1868, 4077, 1710, 1939, 1335, 1666, 1407, 4187, 1193, 1188, 1196, 1724, 1717, 1200, 1646, 1997, 1975, 1701, 4280, 1613, 4006, 1984, 1351, 3653, 3833, 1593, 2561, 4442, 3900, 4298, 1761, 4388, 1820, 1597, 4317, 4249, 1341, 1203, 1680, 4441, 3628, 3725, 1945, 937, 4206, 1588, 1439, 3794, 4447, 1838, 3776, 3658, 4064, 1377, 4011, 4272, 4503, 1324, 1367, 3594, 3680, 1300, 1750, 938, 3913, 3774, 1877, 1987, 1862, 3998, 1380, 4185, 3686, 3696, 4463, 1350, 4008, 4230, 3853, 4244, 4083, 381, 1909, 3897, 1546, 382, 3613, 3273, 3452, 3525, 1229, 4105, 3835, 383, 1263, 1234, 3970, 1492, 3856, 3586, 1175, 4321, 4020, 4144, 1224, 1199, 3667, 2778, 4412, 4407, 1812, 1810, 3823, 1416, 1427, 1507, 1878, 4333, 3146, 4281, 4211, 1179, 3843, 1669, 1677, 1524, 1525, 1974, 384, 1979, 1456, 1239, 4167, 3740, 1876, 1388, 1967, 1474, 385, 1342, 1471, 4176, 1232, 1989, 4125, 1741, 1508, 1580, 4060, 4378, 1576, 1212, 1893, 3921, 3585, 1174, 1396, 4061, 4015, 1207, 3698, 3825, 3922, 4021, 4181, 1598, 1916, 1429, 4502, 4231, 1321, 4390, 3693, 3734, 1382, 3684, 1747, 3806, 3896, 3635, 1768, 4025, 3976, 3840, 3963, 4286, 1502, 3836, 4161, 3659, 3743, 4130, 3605, 1385, 1783, 4392, 4328, 1316, 4173, 4265, 1246, 1985, 1629, 1829, 1737, 3826, 1473, 1992, 1883, 1656, 1837, 1914, 1839, 1834, 3984, 4495, 3910, 4160, 3671, 4184, 4132, 4250, 1503, 1237, 1523, 1417, 4063, 1562, 3977, 1971, 1707, 1847, 1792, 3769, 4074, 1534, 4239, 4003, 3915, 1689, 1776, 1599, 1265, 1410, 1823, 1498, 1329, 939, 386, 940, 387, 1655, 3874, 4261, 3626, 1791, 3579, 1644, 3936, 4054, 4260, 4359, 4131, 4297, 4357, 4022, 3770, 4046, 1222, 1996, 3788, 4169, 1925, 3953, 4228, 4226, 4277, 4101, 1889, 1369, 3797, 4088, 4019, 3771, 3632, 1402, 388, 1520, 1767, 1466, 1194, 4137, 1908, 1927, 1758, 3772, 3661, 4186, 4174, 1170, 3850, 1315, 1611, 1530, 1859, 2209, 4183, 1408, 1403, 941, 4033, 3623, 3596, 1461, 1848, 1173, 1928, 1459, 1765, 1826, 3719, 1931, 3584, 4004, 3591, 3967, 4168, 3957, 3878, 4165, 4191, 3980, 4058, 4200, 4336, 3958, 1260, 4051, 3798, 4032, 1774, 4322, 3991, 4106, 1641, 1570, 3978, 3965, 4464, 3813, 4154, 1365, 4257, 3846, 4345, 4379, 3603, 1693, 3937, 3801, 1787, 1214, 4483, 4201, 1898, 1845, 1226, 1220, 4245, 1347, 3867, 1900, 3640, 3916, 4089, 1209, 3745, 3988, 3975, 4236, 4075, 4146, 4256, 4308, 4000, 4148, 3588, 3868, 4403, 3883, 4326, 4393, 3895, 4237, 3955, 3727, 4005, 4092, 4372, 4283, 1553, 3805, 4151, 1281, 1681, 4489, 3982, 4437, 3597, 4342, 3872, 3987, 4490, 3876, 3668, 4300, 1679, 1242, 3598, 3583, 3647, 389, 4304, 3793, 3779, 1937, 1907, 4042, 3648, 3996, 3800, 4367, 4099, 1807, 3887, 4428, 1625, 1390, 1884, 1682, 4364, 4306, 3869, 1278, 1672, 942, 1505, 1542, 1709, 1915, 3600, 3914, 1968, 3948, 1670, 3811, 1865, 1362, 943, 1716, 3961, 1506, 4221, 1376, 944, 1683, 4276, 1445, 1721, 1632, 3607, 1328, 1455, 1913, 1497, 1317, 1951, 1778, 1379, 3768, 4225, 1668, 1514, 4002, 3679, 3964, 3707, 3666, 1348, 4273, 1804, 4497, 571, 1401, 4438, 1895, 1264, 572, 1912, 573, 3939, 4170, 4056, 1271, 1065, 1521, 1221, 1066, 1451, 1654, 1067, 3934, 4080, 4352, 574, 1700, 3739, 1565, 1419, 1811, 3950, 1690, 1397, 3716, 1569, 1465, 1437, 1674, 4337, 1285, 4268, 1183, 3726, 3881, 4134, 4347, 4012, 3938, 4066, 4198, 4416, 4164, 3630, 4229, 4292, 4193, 4325, 4375, 4371, 4432, 4215, 1753, 3944, 1409, 4195, 1729, 4223, 1540, 4455, 1068, 1069, 4512, 1723, 1070, 3750, 3633, 4070, 4104, 4162, 4235, 1863, 4346, 1881, 1071, 1814, 1572, 2418, 575, 4443, 3761, 1346, 1587, 1072, 3592, 576, 1891, 4469, 2430, 1275, 577, 1950, 1963, 4129, 1073, 1296, 1360, 1551, 3733, 4111, 3993, 4108, 3949, 1287, 1713, 1556, 1736, 1995, 1435, 1424, 1830, 1705, 1861, 1197, 1254, 4120, 1545, 4417, 1469, 1292, 2185, 2279, 1785, 1236, 4293, 1827, 3839, 3983, 4395, 1957, 2222, 578, 3928, 4295, 3715, 3855, 3609, 1990, 4076, 4175, 3927, 1757, 1650, 4299, 1773, 2004, 1267, 1364, 579, 1462, 1879, 4007, 3729, 3665, 3722, 1691, 1712, 1074, 1624, 1751, 1394, 3924, 3952, 580, 581, 2003, 1343, 2203, 1559, 1250, or 1555.

8. The VP capsid polypeptide of any one of claims 1-5, wherein X² of SEQ ID NO: 5014 is K or R.

9. The VP capsid polypeptide of claim 8, wherein the 581 to 589 region of the VP capsid polypeptide has a sequence of any one of SEQ ID NOs: 752, 2144, 1653, 1205, 3795, 753, 4288, 4219, 2770, 2962, 4241, 4107, 2718, 3317, 4391, 4053, 3263, 2553, 3947, 2710, 2608, 3467, 2796, 2961, 2529, 3320, 2674, 2635, 3446, 3053, 3250, 3688, 1182, 1998, 4320, 3351, 2655, 3514, 2779, 3194, 3319, 3224, 3281, 3708, 2807, 3562, 3274, 3374, 3013, 3416, 2981, 3065, 2777, 3469, 2977, 2638, 2972, 3059, 2574, 3380, 4262, 3167, 3368, 2781, 3547, 3386, 1225, 2960, 3485, 3370, 3443, 2824, 754, 1467, 3327, 3178, 3006, 3252, 2991, 3470, 2888, 2572, 3418, 2642, 2519, 3363, 1308, 1230, 3960, 1378, 2994, 3080, 2589, 3681, 51, 1413, 775, 776, 78, 1560, 4289, 3757, 79, 3593, 4043, 1806, 3908, 4397, 1615, 4415, 3723, 2006, 3754, 1470, 4360, 80, 3945, 2854, 3523, 3669, 1356, 777, 778, 87, 3891, 4456, 4040, 4496, 1982, 2001, 1478, 1189, 120, 4791, 2158, 121, 803, 804, 1463, 805, 122, 2139, 2290, 1760, 2465, 123, 130, 131, 132, 4933, 808, 2336, 2026, 2204, 809, 810, 2166, 208, 209, 210, 835, 836, 1334, 837, 3901, 3312, 2649, 1301, 211, 212, 1450, 4386, 3028, 213, 1446, 214, 2206, 215, 1896, 1522, 3490, 838, 216, 234, 4962, 2269, 843, 235, 844, 236, 237, 4930, 845, 846, 238, 847, 1295, 3601, 3877, 1930, 1420, 1678, 1460, 285, 1626, 299, 3809, 4271, 3844, 1436, 300, 1515, 1617, 3646, 4059, 1431, 1331, 310, 3804, 1363, 1934, 1602, 1404, 4188, 1330, 4349, 3337, 3533, 2629, 3038, 2539, 3567, 3291, 3348, 3115, 3359, 2993, 3079, 3506, 2527, 2963, 2938, 2516, 3113, 1345, 2639, 3143, 3044, 2747, 3154, 3280, 3039, 2743, 2902, 3056, 2554, 2522, 3103, 3210, 3434, 2656, 4251, 4166, 4196, 3206, 3328, 2588, 3553, 2714, 3078, 3222, 3137, 3357, 2717, 2944, 3012, 3220, 3202, 2811, 3083, 3269, 3566, 2699, 2515, 3023, 2533, 3288, 3075, 3005, 2685, 3058, 2976, 2622, 3333, 3463, 2939, 3521, 3268, 3117, 2626, 2616, 3240, 2570, 3565, 2919, 3157, 2849, 3444, 2631, 3420, 2659, 3325, 3186, 2920, 3258, 3440, 3457, 3310, 2761, 3134, 2621, 3531, 2711, 2774, 2867, 2585, 3155, 2620, 3156, 2844, 3126, 3160, 2909, 3542, 3225, 2887, 3474, 3218, 2744, 2896, 3135, 3424, 3498, 3529, 2661, 2667, 2549, 2819, 2768, 2935, 3182, 2772, 3230, 3043, 2922, 3581, 3524, 2869, 2610, 3298, 2775, 3108, 2603, 3614, 2612, 2860, 3187, 3238, 3786, 4385, 3016, 3436, 2876, 2987, 3532, 3438, 3561, 3259, 2663, 2890, 3433, 3071, 3018, 2580, 2755, 3015, 2540, 3398, 2664, 2583, 2830, 2644, 2641, 3513, 2725, 2723, 3338, 3556, 2866, 2514, 2932, 2753, 2862, 2899, 2605, 2989, 3096, 3124, 2985, 2716, 3145, 3017, 2591, 2640, 3033, 1853, 3216, 3316, 3412, 2971, 3256, 3153, 3575, 3339, 2915, 2531, 3552, 3475, 3060, 3375, 2756, 3382, 2847, 2859, 3251, 3702, 3423, 2537, 2801, 3076, 2696, 3092, 3459, 3144, 3441, 2802, 3479, 2907, 3512, 3518, 3021, 2871, 3032, 2647, 2945, 3045, 2763, 3313, 3034, 3315, 3541, 2746, 2669, 2524, 3003, 2732, 3166, 3046, 3306, 2873, 3364, 3253, 3215, 3061, 2804, 2722, 2964, 2990, 2836, 4098, 4449, 3173, 2762, 3737, 2628, 3507, 2564, 3031, 2872, 3360, 2658, 2930, 2904, 3244, 3217, 3311, 3445, 2840, 3372, 2958, 3098, 3356, 3456, 3388, 2624, 3207, 2576, 2742, 2665, 2815, 3052, 3421, 2593, 3242, 2535, 2966, 2898, 2858, 2943, 2668, 2798, 3196, 2528, 2713, 3001, 2691, 2948, 2767, 2544, 3302, 2734, 2893, 2592, 2861, 3502, 2969, 2582, 3229, 2676, 2545, 3255, 3330, 2547, 3257, 2882, 3151, 3088, 2883, 3318, 2645, 2733, 2587, 3500, 3008, 2715, 2845, 3183, 2654, 3233, 3267, 2741, 2827, 2704, 3091, 2832, 2736, 3177, 3271, 2835, 2908, 3176, 2947, 3292, 3191, 2517, 3026, 3082, 3392, 3381, 2584, 2712, 3213, 3451, 2634, 3150, 2810, 3303, 2573, 3460, 2615, 3394, 2828, 3329, 4377, 4499, 3555, 2974, 3782, 3629, 3578, 3885, 2817, 3248, 2954, 3334, 3571, 3345, 3551, 3384, 3422, 1357, 1844, 2530, 2973, 4418, 4081, 3951, 1764, 1671, 1852, 334, 1843, 3449, 3185, 3399, 2786, 3055, 3472, 3397, 2601, 3564, 3277, 4373, 3548, 3179, 3407, 3841, 3347, 3142, 4255, 4431, 3241, 3077, 2700, 3147, 2648, 3283, 2829, 3278, 2581, 2536, 4363, 2848, 3410, 2797, 2523, 2520, 2721, 3496, 2571, 3198, 3219, 3030, 2673, 2921, 3837, 3301, 3322, 2705, 3239, 2949, 3369, 3396, 2892, 2897, 2766, 3174, 3297, 2550, 2889, 2933, 2793, 2627, 2677, 3119, 2596, 3226, 3172, 3089, 2868, 2839, 3942, 3120, 3286, 2843, 3465, 1564, 3946, 4222, 1504, 3999, 2682, 1875, 2865, 3539, 3168, 2864, 3308, 3557, 2940, 3109, 3503, 2625, 3455, 3114, 2595, 3331, 2978, 2518, 2521, 4079, 3024, 3573, 2952, 2653, 1769, 3180, 2813, 2652, 2600, 2816, 3201, 3188, 3270, 2997, 2992, 3009, 3520, 2936, 3275, 3165, 3447, 3131, 3305, 2809, 2792, 2729, 2814, 2619, 3266, 2825, 3066, 2857, 2998, 3064, 2681, 3035, 3279, 2764, 3480, 3127, 2912, 3010, 2607, 3211, 3111, 3041, 1573, 3909, 4269, 3487, 3489, 3019, 335, 1266, 1415, 2980, 3428, 1355, 3454, 2851, 2881, 3232, 3458, 3326, 3353, 2927, 3212, 2950, 3376, 3208, 3062, 3612, 3195, 3385, 2686, 2602, 3569, 3123, 2727, 1622, 2821, 2636, 2750, 2850, 3050, 2925, 3336, 3540, 2689, 3139, 2526, 3361, 3022, 3427, 3107, 3140, 3371, 3276, 2831, 3501, 2924, 3366, 3199, 3101, 3321, 3499, 2917, 2683, 2800, 2812, 3340, 3227, 3148, 3657, 4446, 1746, 1464, 1886, 2666, 3246, 3130, 3560, 3236, 2730, 3572, 1607, 3689, 2968, 1457, 1500, 909, 337, 1184, 3450, 2577, 2567, 2532, 3415, 2934, 2984, 2568, 4147, 4498, 1518, 3728, 3637, 3570, 3429, 4091, 2870, 2995, 4338, 3205, 2880, 3261, 1994, 3968, 4291, 4204, 4071, 4034, 1742, 2037, 352, 2820, 3912, 3287, 1218, 1190, 1959, 1840, 3736, 1283, 3861, 1383, 3644, 3691, 4259, 1749, 1418, 1176, 4216, 1924, 1421, 1387, 3992, 4423, 4253, 1618, 1871, 1256, 3748, 4119, 1297, 1586, 1251, 1299, 1954, 4450, 3990, 4029, 4097, 3890, 3796, 1389, 3711, 4344, 1578, 1476, 4343, 1202, 4413, 4384, 3808, 1647, 1475, 3892, 3674, 1739, 3926, 3595, 1943, 3756, 4405, 3973, 4109, 4159, 3744, 4387, 1960, 4275, 3781, 1535, 1210, 4492, 4365, 4118, 3655, 3886, 4278, 4383, 4485, 1392, 3751, 3931, 3986, 3678, 1249, 4353, 4208, 3710, 4238, 4213, 3969, 4436, 3175, 4128, 2970, 1228, 3534, 3437, 3406, 3641, 3639, 3954, 4335, 3995, 3582, 4475, 3784, 4470, 4010, 3802, 3941, 4427, 4396, 4348, 3587, 3818, 3864, 3956, 3863, 3731, 3814, 4067, 4354, 4350, 4334, 3821, 1932, 3929, 4171, 1258, 3824, 3631, 4465, 4494, 1320, 1398, 3828, 1204, 1223, 1284, 1685, 3773, 4209, 3014, 4462, 4246, 4190, 4312, 4023, 3760, 3753, 1178, 3884, 2783, 4038, 3545, 2916, 3112, 2834, 3880, 3673, 4102, 4399, 4048, 3752, 4207, 1235, 3943, 4355, 4087, 4100, 4327, 4037, 4163, 3918, 4486, 1243, 3933, 4178, 1662, 1643, 4152, 3634, 3617, 4445, 4303, 1370, 3838, 4199, 4284, 1213, 4382, 1399, 1187, 3714, 1828, 4487, 3615, 1842, 1501, 3746, 4018, 4420, 3606, 4121, 3724, 3935, 1941, 4419, 4282, 1955, 1949, 4310, 4488, 1577, 4127, 1288, 1171, 3670, 4052, 3627, 3777, 936, 1371, 3685, 1325, 1940, 380, 4482, 4258, 3812, 1581, 1860, 4124, 4508, 4500, 3652, 3972, 1309, 1630, 1528, 3717, 1217, 3692, 4430, 3764, 4316, 4285, 3645, 3971, 4421, 1172, 4026, 2740, 3125, 3546, 1725, 1206, 3842, 4404, 3690, 3962, 4513, 4340, 4329, 4410, 3703, 4136, 1763, 1487, 3589, 3907, 4153, 2707, 3730, 4426, 4180, 4041, 3923, 4444, 3851, 4429, 4361, 1441, 4394, 4302, 3758, 4510, 3742, 1868, 4077, 1710, 1939, 1335, 1666, 1407, 4187, 1193, 1188, 1196, 1724, 1717, 1200, 1646, 4176, 1232, 1989, 4125, 1741, 1508, 1580, 4060, 4378, 1576, 1212, 1893, 3921, 3585, 1174, 1396, 4061, 4015, 1207, 3698, 3825, 3922, 4021, 4181, 1598, 1916, 1429, 4502, 4231, 1321, 4390, 3693, 3734, 1382, 3684, 1747, 3806, 3896, 3635, 1768, 4025, 3976, 3840, 3963, 4286, 1502, 3836, 4161, 3659, 3743, 4130, 3605, 1385, 1783, 4392, 4328, 1316, 4173, 4265, 1246, 1985, 1629, 1829, 1737, 3826, 1473, 1992, 1883, 1656, 1837, 1914, 1839, 1834, 3984, 4495, 3910, 4160, 3671, 4184, 4132, 4250, 1503, 1237, 1523, 1417, 4063, 1562, 3977, 1971, 1707, 1847, 1792, 3769, 4074, 1534, 4239, 4003, 3915, 1689, 1776, 1599, 1265, 1410, 1823, 1498, 954, 955, 2437, 4139, 1482, 3602, 4434, 3721, 1592, 1825, 1698, 1519, 1352, 4202, 4409, 1977, 1917, 2382, 3675, 1833, 3974, 419, 4309, 4045, 3854, 3682, 2491, 444, 445, 1972, 2688, 4366, 3425, 3231, 3649, 2759, 2724, 3873, 3755, 1216, 3599, 3775, 2754, 2606, 3471, 3234, 2565, 2803, 2562, 2684, 3411, 3405, 2690, 1255, 3694, 446, 3985, 3535, 1306, 4084, 3282, 447, 1353, 2168, 3879, 2698, 1894, 1882, 1817, 1880, 490, 1018, 3917, 3616, 4311, 1800, 4473, 4085, 4401, 1310, 3783, 3765, 1538, 3870, 491, 1948, 3699, 1735, 3792, 4290, 2074, 492, 1019, 2012, 1803, 3642, 497, 1322, 1261, 4027, 3478, 3763, 2959, 1293, 2462, 517, 3197, 1595, 3413, 1675, 1616, 1901, 1796, 1517, 4331, 4332, 4466, 2719, 3803, 4123, 4233, 1824, 3129, 3087, 3505, 4158, 4254, 1449, 2121, 1044, 3720, 4351, 4414, 1673, 3453, 3254, 2501, 1050, 3515, 2219, 1433, 1323, 4301, 1569, 1465, 1437, 1674, 4337, 1285, 4268, 1183, 3726, 3881, 4134, 4347, 4012, 3938, 4066, 4198, 4416, 4164, 3630, 4229, 4292, 4193, 4325, 4375, 4371, 4432, 4215, 1753, 3944, 1409, 4195, 1729, 4223, 1540, 4455, 1068, 1069, 4512, 1723, 1070, 3750, 3633, 4070, 4104, 4162, 4235, 1863, 4346, 1881, 1360, 1551, 3733, 4111, 3993, 4108, 3949, 1287, 1713, 1556, 1736, 1995, 1435, 1424, 1830, 1705, 1861, 1197, 1254, 4120, 1545, 4417, 1469, 1292, 1858, 596, 597, 598, 1453, 2559, 2590, 2738, 4478, 4069, 1809, 1327, 4150, 3260, 3481, 3672, 3625, 2008, 4439, 3852, 3997, 1411, 599, 3847, 4993, 1268, 4050, 3377, 4424, 1496, 4143, 4493, 3492, 1962, 1412, 2324, 605, 1368, 3827, 4103, 606, 607, 1113, 3735, 3390, 1694, 3431, 2838, 3483, 3464, 3848, 2558, 3314, 3086, 3029, 2956, 3517, 2651, 2914, 2680, 2632, 3121, 3100, 3528, 3526, 3084, 4220, 3304, 2846, 1186, 3235, 2903, 3559, 2687, 3409, 3237, 2900, 2999, 3349, 3171, 2752, 3262, 3504, 3047, 4376, 3193, 3430, 2525, 2670, 2911, 3508, 2776, 2697, 3200, 2790, 3323, 2543, 2874, 2614, 3904, 3373, 3054, 2617, 4242, 3621, 2708, 4179, 4398, 3959, 4935, 1269, 3095, 1286, 3624, 4481, 1432, 3511, 2735, 4381, 3295, 1585, 2390, 1568, 4035, 2910, 3391, 2808, 3099, 2913, 3676, 2852, 3284, 2731, 1609, 2375, 2201, 3537, 3994, 1319, 4467, 1802, 1227, 1623, 702, 703, 4031, 4305, 1636, 1393, 2010, 3810, 4452, 3677, 4227, 1277, 1400, 4402, 4157, 4197, 1337, 1253, 1532, 4028, 3989, 2449, 4715, 704, 2050, 1493, 1854, 1902, 1510, 4879, 1841, 4234, 4924, 1154, 1314, 4096, 2023, 3815, 2005, 1964, 3439, 2833, 4287, 4509, 4505, 4267, 3697, 3272, 4112, 2967, 3651, 1991, 1805, 1628, 3705, or 2250.

10. The VP capsid polypeptide of any one of claims 1-5, wherein X³ of SEQ ID NO: 5014 is K or R.

11. The VP capsid polypeptide of claim 10, wherein the 581 to 589 region of the VP capsid polypeptide has a sequence of any one of SEQ ID NOs: 4177, 1289, 740, 741, 18, 745, 3477, 1548, 3051, 2982, 2877, 3036, 3426, 3073, 3169, 747, 3362, 2784, 21, 3192, 23, 1638, 748, 1703, 1836, 3660, 29, 750, 1640, 33, 34, 35, 36, 37, 38, 1205, 3795, 753, 4288, 4219, 2770, 2962, 4241, 4107, 2718, 3317, 4391, 4053, 3263, 2553, 3947, 2710, 2608, 3467, 2796, 2961, 2529, 3320, 2674, 2635, 3446, 3053, 3250, 3688, 1182, 1998, 4320, 3351, 2655, 3514, 2779, 3194, 3319, 3224, 3281, 3708, 2807, 3562, 3274, 3374, 3013, 3416, 2981, 3065, 2777, 3469, 2977, 2638, 2972, 3059, 2574, 3380, 4262, 3167, 3368, 2781, 3547, 3386, 1225, 2960, 3485, 3370, 3443, 2824, 3327, 3178, 3006, 3252, 2991, 3470, 2888, 2572, 3418, 2642, 2519, 3363, 40, 2633, 41, 42, 43, 755, 45, 756, 46, 48, 1952, 758, 49, 3122, 2551, 3718, 3484, 3577, 759, 1230, 3960, 1378, 2994, 3080, 2589, 3681, 760, 53, 3925, 55, 3654, 56, 61, 4086, 1740, 1660, 765, 766, 62, 1966, 63, 64, 768, 771, 65, 66, 67, 68, 3816, 2599, 2706, 74, 3865, 1549, 1361, 3882, 3713, 1942, 1312, 4501, 76, 77, 1560, 4289, 3757, 79, 3593, 4043, 1806, 3908, 4397, 1615, 4415, 3723, 2006, 3754, 1470, 4360, 3945, 2854, 3523, 3669, 82, 4065, 83, 1294, 1484, 3891, 4456, 4040, 4496, 1982, 2001, 1478, 1189, 1490, 1885, 1926, 89, 90, 91, 779, 1180, 92, 785, 786, 94, 95, 1831, 1867, 4458, 97, 1970, 1936, 1590, 100, 789, 790, 1298, 101, 1688, 791, 792, 2007, 103, 794, 795, 104, 105, 106, 1849, 108, 1579, 110, 1906, 113, 1444, 1344, 116, 802, 117, 118, 121, 803, 804, 1463, 805, 122, 124, 125, 127, 807, 132, 809, 810, 133, 1978, 812, 135, 136, 137, 138, 813, 140, 815, 1326, 141, 142, 143, 144, 145, 1634, 1302, 817, 146, 818, 147, 148, 149, 151, 152, 153, 154, 155, 819, 820, 157, 159, 160, 163, 164, 165, 166, 822, 167, 168, 169, 170, 171, 823, 824, 1651, 173, 1483, 174, 175, 825, 176, 177, 826, 827, 181, 828, 182, 829, 184, 185, 186, 187, 188, 189, 830, 191, 192, 193, 194, 195, 196, 1391, 197, 200, 201, 202, 203, 204, 205, 832, 833, 206, 834, 836, 1334, 837, 3901, 3312, 2649, 1301, 211, 212, 1450, 4386, 3028, 213, 1446, 214, 215, 1896, 1522, 3490, 838, 217, 218, 219, 1612, 220, 221, 222, 839, 223, 840, 224, 226, 227, 230, 231, 842, 232, 233, 844, 236, 237, 851, 852, 853, 1536, 240, 854, 242, 243, 244, 245, 246, 247, 249, 250, 251, 252, 253, 254, 255, 857, 256, 257, 258, 259, 858, 859, 260, 261, 860, 861, 862, 262, 264, 1241, 265, 266, 866, 1477, 267, 867, 869, 870, 271, 871, 872, 272, 1252, 273, 1591, 275, 1980, 276, 876, 877, 277, 278, 279, 1892, 1539, 880, 1295, 3601, 3877, 1930, 1420, 1678, 1460, 282, 1799, 283, 1626, 1374, 287, 1620, 1290, 1354, 888, 291, 1956, 889, 292, 4324, 293, 4138, 891, 3903, 297, 3829, 3809, 4271, 3844, 1436, 1515, 1617, 1961, 304, 306, 1589, 4370, 308, 309, 894, 3646, 4059, 1431, 1331, 312, 895, 1779, 313, 314, 315, 316, 896, 1558, 1552, 898, 321, 322, 899, 1958, 901, 325, 902, 326, 1491, 329, 330, 905, 4484, 1756, 3536, 2701, 2799, 3332, 3294, 3159, 3069, 2637, 3025, 2782, 3247, 3350, 2692, 2586, 3004, 3049, 2694, 2650, 3554, 2983, 3403, 3214, 3163, 2541, 3090, 3097, 3462, 1430, 2941, 3486, 2842, 3558, 3104, 3037, 3419, 2780, 2931, 1276, 2928, 2609, 3068, 3128, 2548, 2538, 2618, 2789, 3228, 2657, 3189, 2863, 3307, 3300, 2546, 3048, 3543, 2946, 2975, 3346, 3067, 2728, 2955, 3408, 3027, 3094, 3203, 2988, 2751, 2953, 2566, 2578, 2823, 3063, 3335, 3000, 3181, 3011, 3138, 3389, 2805, 3074, 2894, 3149, 2560, 3417, 3265, 3378, 2901, 2837, 2822, 2745, 3473, 3530, 3040, 2597, 3509, 3522, 3161, 2926, 3209, 3105, 3400, 2630, 2905, 2671, 2818, 2806, 2702, 2709, 3549, 3538, 2534, 2773, 2623, 3491, 3243, 3136, 2693, 3164, 3343, 2918, 2555, 2794, 2679, 3510, 3110, 2672, 3442, 2929, 3184, 3488, 3093, 2996, 3141, 3544, 3102, 2856, 2957, 3466, 3461, 2788, 2660, 3344, 3204, 2720, 3379, 2826, 1789, 2785, 3249, 3527, 4460, 3352, 2569, 4457, 2011, 4319, 3906, 1533, 1755, 1888, 4248, 1557, 1404, 4188, 1330, 4349, 3337, 3533, 2629, 3038, 2539, 3567, 3291, 3348, 3115, 3359, 2993, 3079, 3506, 2527, 2963, 2938, 2516, 3113, 1345, 2639, 3143, 3044, 2747, 3154, 3280, 3039, 2743, 2902, 3056, 2554, 2522, 3103, 3210, 3434, 2656, 4251, 4166, 4196, 3206, 3328, 2588, 3553, 2714, 3078, 3222, 3137, 3357, 2717, 2944, 3012, 3220, 3202, 2811, 3083, 3269, 3566, 2699, 2515, 3023, 2533, 3288, 3075, 3005, 2685, 3058, 2976, 2622, 3333, 3463, 2939, 3521, 3268, 3117, 2626, 2616, 3240, 2570, 3565, 2919, 3157, 2849, 3444, 2631, 3420, 2659, 3325, 3186, 2920, 3258, 3440, 3457, 3310, 2761, 3134, 2621, 3531, 2711, 2774, 2867, 2585, 3155, 2620, 3156, 2844, 3126, 3160, 2909, 3542, 3225, 2887, 3474, 3218, 2744, 2896, 3135, 3424, 3498, 3529, 2661, 2667, 2549, 2819, 2768, 2935, 3182, 2772, 3230, 3043, 2922, 3581, 3524, 2869, 2610, 3298, 2775, 3108, 2603, 3614, 2612, 2860, 3187, 3238, 3786, 4385, 3016, 3436, 2876, 2987, 3532, 3438, 3561, 3259, 2663, 2890, 3433, 3071, 3018, 2580, 2755, 3015, 2540, 3398, 2664, 2583, 2830, 2644, 2641, 3513, 2725, 2723, 3338, 3556, 2866, 2514, 2932, 2753, 2862, 2899, 2605, 2989, 3096, 3124, 2985, 2716, 3145, 3017, 2591, 2640, 3033, 1853, 3216, 3316, 3412, 2971, 3256, 3153, 3575, 3339, 2915, 2531, 3552, 3475, 3060, 3375, 2756, 3382, 2847, 2859, 3251, 3702, 3423, 2537, 2801, 3076, 2696, 3092, 3459, 3144, 3441, 2802, 3479, 2907, 3512, 3518, 3021, 2871, 3032, 2647, 2945, 3045, 2763, 3313, 3034, 3315, 3541, 2746, 2669, 2524, 3003, 2732, 3166, 3046, 3306, 2873, 3364, 3253, 3215, 3061, 2804, 2722, 2964, 2990, 2836, 4098, 4449, 3173, 2762, 3737, 2628, 3507, 2564, 3031, 2872, 3360, 2658, 2930, 2904, 3244, 3217, 3311, 3445, 2840, 3372, 2958, 3098, 3356, 3456, 3388, 2624, 3207, 2576, 2742, 2665, 2815, 3052, 3421, 2593, 3242, 2535, 2966, 2898, 2858, 2943, 2668, 2798, 3196, 2528, 2713, 3001, 2691, 2948, 2767, 2544, 3302, 2734, 2893, 2592, 2861, 3502, 2969, 2582, 3229, 2676, 2545, 3255, 3330, 2547, 3257, 2882, 3151, 3088, 2883, 3318, 2645, 2733, 2587, 3500, 3008, 2715, 2845, 3183, 2654, 3233, 3267, 2741, 2827, 2704, 3091, 2832, 2736, 3177, 3271, 2835, 2908, 3176, 2947, 3292, 3191, 2517, 3026, 3082, 3392, 3381, 2584, 2712, 3213, 3451, 2634, 3150, 2810, 3303, 2573, 3460, 2615, 3394, 2828, 3329, 4377, 4499, 3555, 2974, 3782, 3629, 3578, 3885, 2817, 3248, 2954, 3334, 3571, 3345, 3551, 3384, 3422, 1357, 1844, 2530, 2973, 4418, 4081, 3951, 1764, 1671, 1843, 3449, 3185, 3399, 2786, 3055, 3472, 3397, 2601, 3564, 3277, 4373, 3548, 3179, 3407, 3841, 3347, 3142, 4255, 4431, 3241, 3077, 2700, 3147, 2648, 3283, 2829, 3278, 2581, 2536, 4363, 2848, 3410, 2797, 2523, 2520, 2721, 3496, 2571, 3198, 3219, 3030, 2673, 2921, 3837, 3301, 3322, 2705, 3239, 2949, 3369, 3396, 2892, 2897, 2766, 3174, 3297, 2550, 2889, 2933, 2793, 2627, 2677, 3119, 2596, 3226, 3172, 3089, 2868, 2839, 3942, 3120, 3286, 2843, 3465, 1564, 3946, 4222, 1504, 3999, 2682, 1875, 2865, 3539, 3168, 2864, 3308, 3557, 2940, 3109, 3503, 2625, 3455, 3114, 2595, 3331, 2978, 2518, 2521, 4079, 3024, 3573, 2952, 2653, 1769, 3180, 2813, 2652, 2600, 2816, 3201, 3188, 3270, 2997, 2992, 3009, 3520, 2936, 3275, 3165, 3447, 3131, 3305, 2809, 2792, 2729, 2814, 2619, 3266, 2825, 3066, 2857, 2998, 3064, 2681, 3035, 3279, 2764, 3480, 3127, 2912, 3010, 2607, 3211, 3111, 3041, 1573, 3909, 4269, 3487, 3489, 3019, 335, 1266, 3435, 3482, 3020, 2748, 2646, 2787, 2760, 2563, 3085, 3133, 3158, 3170, 2703, 3494, 2552, 3395, 3245, 3404, 2675, 2791, 1911, 908, 1935, 2749, 3341, 3355, 2575, 2942, 2886, 2758, 2594, 3495, 2884, 3516, 3042, 2737, 2923, 3563, 2855, 3476, 2611, 2937, 3383, 3497, 3402, 3162, 2662, 2875, 3223, 2878, 1808, 3285, 2757, 3057, 2951, 3519, 2579, 2853, 3387, 3401, 3493, 3393, 1608, 3365, 2885, 3574, 3081, 3007, 3568, 3152, 3367, 3358, 336, 3468, 3290, 3550, 3132, 2726, 2879, 3190, 3309, 2613, 2765, 3106, 1355, 3454, 2851, 2881, 3232, 3458, 3326, 3353, 2927, 3212, 2950, 3376, 3208, 3062, 3612, 3195, 3385, 2686, 2602, 3569, 3123, 2727, 1622, 2821, 2636, 2750, 2850, 3050, 2925, 3336, 3540, 2689, 3139, 2526, 3361, 3022, 3427, 3107, 3140, 3371, 3276, 2831, 3501, 2924, 3366, 3199, 3101, 3321, 3499, 2917, 2683, 2800, 2812, 3340, 3227, 3148, 3657, 4446, 1746, 1464, 1886, 2666, 3246, 3130, 3560, 3236, 2730, 3572, 1607, 3689, 2968, 1457, 1500, 909, 337, 1184, 3450, 2577, 2567, 2532, 3415, 2934, 2984, 2568, 4147, 3002, 2986, 2979, 2542, 1762, 4472, 1472, 1529, 4057, 1976, 4507, 1583, 338, 911, 1711, 340, 912, 2013, 341, 4440, 917, 344, 918, 919, 921, 922, 347, 351, 923, 924, 4498, 1518, 3728, 3637, 3570, 3429, 4091, 2870, 2995, 4338, 3205, 2880, 3261, 1994, 3968, 4291, 4204, 4071, 4034, 1742, 2820, 3912, 3287, 4145, 354, 925, 1782, 926, 927, 3610, 357, 359, 4224, 1918, 1959, 3736, 1770, 931, 4155, 364, 1279, 365, 1543, 367, 4049, 1633, 1722, 368, 369, 1495, 1566, 370, 1211, 1873, 4142, 1434, 1358, 1191, 3732, 4110, 4039, 4411, 4506, 4270, 4156, 3780, 4036, 4030, 4016, 1550, 3899, 1247, 1855, 1181, 3919, 1639, 3664, 1244, 4140, 3930, 4117, 4189, 4001, 3799, 3643, 3619, 1240, 1686, 1479, 1307, 1575, 4296, 1665, 3871, 4135, 1605, 4408, 3604, 1274, 3741, 1938, 3709, 1727, 3893, 1280, 3622, 1784, 3834, 1752, 1983, 1743, 3979, 4461, 4113, 3817, 4232, 1340, 1489, 4214, 1219, 1486, 1512, 1481, 1516, 3820, 3789, 4252, 4047, 4330, 4082, 4094, 1574, 1248, 4078, 1872, 1426, 3785, 3687, 4318, 4243, 3866, 3704, 4172, 1621, 4315, 1192, 1513, 1856, 3324, 2769, 2678, 1561, 3296, 377, 1395, 4453, 3940, 3778, 4374, 4210, 4009, 4264, 4339, 4368, 1738, 378, 1610, 4194, 4474, 4013, 4266, 1771, 3860, 3832, 1349, 1381, 3663, 1642, 1185, 4356, 3932, 1233, 4212, 3858, 1198, 4192, 3611, 1919, 1819, 3790, 3712, 1969, 4095, 1887, 4468, 1720, 4247, 2002, 1657, 1663, 1336, 3894, 1554, 1494, 1405, 3576, 4314, 3695, 1851, 4362, 1815, 3845, 4511, 3656, 3638, 1406, 1596, 4454, 1443, 1661, 1359, 1734, 3650, 1910, 1648, 3831, 4435, 1208, 1988, 4451, 1993, 1986, 3849, 1718, 4068, 1835, 1425, 1428, 1282, 4380, 1658, 1452, 1687, 4024, 379, 4072, 3791, 4491, 4323, 4014, 1304, 1440, 1511, 1981, 1676, 1547, 4422, 4450, 3990, 4029, 4097, 3890, 3796, 1389, 3711, 4344, 1578, 1476, 4343, 1202, 4413, 4384, 3808, 1647, 1475, 3892, 3674, 1739, 3926, 3595, 1943, 3756, 4405, 3973, 4109, 4159, 3744, 4387, 1960, 4275, 3781, 1535, 1210, 4492, 4365, 4118, 3655, 3886, 4278, 4383, 4485, 1392, 3751, 3931, 3986, 3678, 1249, 4353, 4208, 3710, 4238, 4213, 3969, 4436, 3175, 4128, 2970, 1228, 3534, 3437, 3406, 3641, 3639, 3954, 4335, 3995, 3582, 4475, 3784, 4470, 4010, 3802, 3941, 4427, 4396, 4348, 3587, 3818, 3864, 3956, 3863, 3731, 3814, 4067, 4354, 4350, 4334, 3821, 1932, 3929, 4171, 1258, 3824, 3631, 4465, 4494, 1320, 1398, 3828, 1204, 1223, 1284, 1685, 3773, 4209, 3014, 4462, 4246, 4190, 4312, 4023, 3760, 3753, 1178, 3884, 2783, 4038, 3545, 2916, 3112, 2834, 3880, 3673, 4102, 4399, 4048, 3752, 4207, 1235, 3943, 4355, 4087, 4100, 4327, 4037, 4163, 3918, 4486, 1243, 3933, 4178, 1662, 1643, 4152, 3634, 3617, 4445, 4303, 1370, 3838, 4199, 4284, 1213, 4382, 1399, 1187, 3714, 1828, 4487, 3615, 1842, 1501, 3746, 4018, 4420, 3606, 4121, 3724, 3935, 1941, 4419, 4282, 1955, 1949, 4310, 4488, 1577, 4127, 1288, 1171, 3670, 4052, 1860, 4124, 4508, 4500, 3652, 3972, 1309, 1630, 1528, 3717, 1217, 3692, 4430, 3764, 4316, 4285, 3645, 3971, 4421, 1172, 4026, 2740, 3125, 3546, 1725, 1206, 3842, 4404, 3690, 3962, 4513, 4340, 4329, 4410, 3703, 4136, 1763, 1487, 3589, 3907, 4153, 2707, 3730, 4426, 4180, 4041, 3923, 4444, 3851, 4429, 4361, 1441, 4394, 4302, 3758, 4510, 3742, 1868, 4077, 1710, 1939, 1335, 1997, 1975, 1701, 4280, 1613, 4006, 1984, 1351, 3653, 3833, 1593, 2561, 4442, 3900, 4298, 1761, 4388, 1820, 1597, 4317, 4249, 1341, 1680, 4441, 3628, 3725, 1945, 4206, 1588, 1439, 3794, 4447, 1838, 3776, 3658, 4064, 1377, 4011, 4272, 4503, 1367, 3594, 3680, 1300, 1750, 3913, 3774, 1877, 1987, 1862, 3998, 1380, 4185, 3686, 3696, 4463, 1350, 4008, 4230, 3853, 4244, 4083, 381, 1909, 3897, 1546, 3613, 3273, 3452, 3525, 1229, 4105, 3835, 383, 1234, 3970, 1492, 3856, 3586, 1175, 4321, 4020, 4144, 1224, 1199, 3667, 2778, 4412, 4407, 1812, 1810, 3823, 1416, 1427, 1507, 1878, 4333, 3146, 4281, 4211, 1179, 3843, 1669, 1677, 1524, 1525, 1974, 384, 1979, 1456, 1239, 4167, 3740, 1876, 1388, 1967, 1474, 385, 1342, 1508, 1580, 4060, 4378, 1576, 1212, 1893, 3921, 3585, 1174, 1396, 4061, 4015, 1207, 3698, 3825, 3922, 4021, 4181, 1598, 1916, 1429, 4502, 4231, 1321, 4390, 3693, 3734, 1382, 3684, 1747, 3806, 3896, 3635, 1768, 4025, 3976, 3840, 3963, 4286, 1502, 3836, 4161, 3659, 3743, 4130, 3605, 1385, 1783, 4392, 4328, 1316, 4173, 4265, 1246, 1985, 1629, 1829, 1737, 1837, 1914, 1839, 1834, 3984, 4495, 3910, 4160, 3671, 4184, 4132, 4250, 1503, 1237, 1523, 1417, 4063, 1562, 3977, 1971, 1707, 1847, 1792, 3769, 4074, 1534, 4239, 4003, 3915, 1689, 1776, 1599, 1265, 1655, 3874, 4261, 3626, 1791, 3579, 1644, 3936, 4054, 4260, 4359, 4131, 4297, 4357, 4022, 3770, 4046, 1222, 1996, 3788, 4169, 1925, 3953, 4228, 4226, 4277, 4101, 1889, 1369, 3797, 4088, 4019, 3771, 3632, 1402, 1520, 1767, 1466, 1194, 4137, 1908, 1927, 1758, 3772, 3661, 4186, 4174, 1170, 3850, 1315, 1611, 1530, 3596, 1461, 1848, 1173, 1928, 1459, 1765, 1826, 3719, 1931, 3584, 4004, 3591, 3967, 4168, 3957, 3878, 4165, 4191, 3980, 4058, 4200, 4336, 3958, 1260, 4051, 3798, 4032, 1774, 4322, 3991, 4106, 1641, 1570, 3978, 3965, 4464, 3813, 4154, 1365, 4257, 3846, 4345, 4379, 3603, 1693, 3937, 3801, 1787, 1214, 4483, 4201, 1898, 4245, 1347, 3867, 1900, 3640, 3916, 4089, 1209, 3745, 3988, 3975, 4236, 4075, 4146, 4256, 4308, 4000, 4148, 3588, 3868, 4403, 3883, 4326, 4393, 3895, 4237, 3955, 3727, 4005, 4092, 4372, 4283, 1553, 3805, 4151, 1281, 1681, 4489, 3982, 4437, 3597, 4342, 3872, 3987, 4490, 3876, 3668, 4300, 1679, 1242, 3598, 3583, 3647, 389, 4304, 3793, 3779, 1937, 1907, 4042, 3648, 3996, 3800, 4367, 4099, 1807, 3887, 4428, 1625, 1390, 1884, 1682, 4364, 4306, 3869, 1278, 1672, 942, 1505, 1542, 1709, 1915, 3600, 3914, 1968, 3948, 1670, 3811, 1865, 1362, 1716, 3961, 1506, 4221, 1376, 1683, 4276, 1445, 1721, 1632, 3607, 1328, 1455, 1913, 1497, 1317, 1951, 1778, 1379, 3768, 4225, 1668, 390, 391, 4406, 4341, 1480, 395, 1714, 1422, 396, 397, 3618, 4433, 1177, 3898, 398, 949, 950, 399, 951, 400, 1965, 4471, 952, 402, 2475, 403, 404, 4139, 1482, 3602, 4434, 3721, 1592, 1519, 1352, 4202, 4409, 1977, 1917, 407, 408, 1631, 1684, 409, 3889, 958, 959, 412, 960, 414, 415, 961, 1905, 416, 963, 417, 3675, 1833, 3974, 420, 421, 965, 966, 969, 970, 422, 1897, 423, 4133, 3830, 972, 424, 973, 427, 1708, 4141, 3749, 431, 1619, 975, 4044, 3590, 1944, 4126, 1923, 1706, 4400, 434, 1606, 979, 2604, 2895, 436, 3448, 1692, 983, 3862, 4055, 4358, 984, 985, 1664, 445, 1972, 2688, 4366, 3425, 3231, 3649, 2759, 2724, 3873, 3755, 1216, 3599, 3775, 2754, 2606, 3471, 3234, 2565, 2803, 2562, 2684, 3411, 3405, 2690, 1255, 3694, 3535, 1306, 4084, 3282, 1780, 987, 988, 990, 451, 452, 991, 992, 1728, 994, 995, 454, 1696, 3116, 1869, 456, 1386, 999, 3879, 2698, 1001, 461, 1447, 462, 464, 4425, 1645, 1231, 1468, 472, 473, 476, 1273, 1007, 1744, 1488, 1659, 477, 1604, 481, 4313, 482, 483, 1499, 484, 1016, 4073, 1777, 1458, 4274, 487, 1775, 4205, 1526, 1697, 1017, 2000, 489, 3917, 3616, 4311, 1800, 4473, 4085, 4401, 1310, 3783, 3765, 491, 1948, 3699, 1735, 3792, 4290, 495, 4090, 496, 2012, 1803, 3642, 1322, 498, 1021, 1022, 502, 1333, 503, 1023, 1890, 510, 1026, 3608, 1732, 511, 2397, 1864, 1816, 1531, 3636, 1699, 1027, 1029, 1366, 2112, 1261, 4027, 3478, 3763, 2959, 517, 3197, 1595, 3413, 1448, 518, 1675, 1797, 520, 1999, 3759, 1215, 4122, 1730, 524, 526, 3966, 3911, 529, 3289, 1821, 530, 531, 1874, 1038, 536, 537, 3767, 1929, 1041, 1042, 3683, 542, 1338, 4331, 4332, 4466, 2719, 3803, 4123, 4233, 1824, 3129, 3087, 3505, 4158, 4254, 1449, 3720, 4351, 4414, 1673, 3453, 3254, 1649, 546, 4240, 3580, 1046, 1047, 550, 2598, 551, 552, 3819, 1259, 4062, 2841, 1050, 3515, 4301, 1052, 1053, 3738, 1567, 1270, 3857, 1055, 1257, 1238, 3662, 561, 562, 1058, 4203, 1899, 3981, 1062, 1303, 4116, 567, 1946, 3620, 1514, 4002, 3679, 3964, 3707, 3666, 1348, 4273, 1804, 4497, 1401, 4438, 1895, 1264, 572, 1912, 3939, 4170, 4056, 1271, 1065, 1521, 1221, 1451, 1654, 3934, 4080, 4352, 1700, 3739, 1565, 1419, 1811, 3950, 1690, 1397, 3716, 1437, 1674, 4337, 1285, 4268, 1183, 3726, 3881, 4134, 4347, 4012, 3938, 4066, 4198, 4416, 4164, 3630, 4229, 4292, 4193, 4325, 4375, 4371, 4432, 4215, 1753, 3944, 1409, 4195, 1729, 4223, 1540, 1723, 1070, 3750, 3633, 4070, 4104, 4162, 4235, 1863, 4346, 1881, 1814, 1572, 4443, 3761, 1346, 1587, 1072, 3592, 576, 1891, 4469, 1275, 1950, 1963, 4129, 1296, 1551, 3733, 4111, 3993, 4108, 3949, 1287, 1713, 1736, 1995, 1435, 1424, 1830, 1705, 1861, 1197, 1254, 4120, 1545, 4417, 1469, 1785, 1236, 4293, 3839, 3983, 4395, 1957, 3928, 4295, 3715, 3855, 3609, 1990, 4076, 4175, 3927, 1757, 1650, 4299, 1773, 2004, 1267, 1364, 1462, 1879, 4007, 3729, 3665, 3722, 1691, 1624, 1751, 1394, 3924, 3952, 580, 581, 2003, 1343, 1559, 1250, 1555, 4114, 1818, 1075, 1076, 1077, 1704, 4448, 1078, 1079, 1786, 585, 3354, 1832, 3432, 2891, 2505, 1903, 1081, 1082, 4459, 1083, 1563, 590, 591, 1085, 594, 1453, 2559, 2590, 2738, 4478, 4069, 1809, 1327, 4150, 3260, 3481, 3672, 3625, 2008, 4439, 3852, 3997, 1411, 599, 3847, 1268, 4050, 3377, 4424, 1496, 4143, 4493, 3492, 1962, 600, 601, 4017, 4477, 1794, 4263, 3072, 2009, 1754, 1087, 1088, 3888, 1368, 3827, 4103, 606, 1090, 1571, 1091, 1438, 1092, 1093, 612, 1094, 3701, 4389, 613, 1603, 1332, 1715, 4369, 1652, 1096, 617, 1541, 618, 1921, 1733, 1373, 1870, 619, 4218, 1798, 1100, 1702, 1101, 1667, 1384, 623, 3700, 1788, 1600, 624, 626, 2771, 627, 1339, 3875, 628, 629, 3070, 4860, 2557, 2795, 2906, 3118, 1614, 1947, 4479, 3766, 632, 1104, 1105, 633, 1813, 636, 3706, 1110, 640, 1111, 641, 642, 1694, 3431, 2838, 3483, 3464, 3848, 2558, 3314, 3086, 3029, 2956, 3517, 2651, 2914, 2680, 2632, 3121, 3100, 3528, 3526, 3084, 4220, 3304, 2846, 1186, 3235, 2903, 3559, 2687, 3409, 3237, 2900, 2999, 3349, 3171, 2752, 3262, 3504, 3047, 4376, 3193, 3430, 2525, 2670, 2911, 3508, 2776, 2697, 3200, 2790, 3323, 2543, 2874, 2614, 3904, 3373, 3054, 2617, 4242, 3621, 2708, 4179, 4398, 3959, 3095, 1286, 3624, 4481, 1432, 3511, 2735, 4381, 3295, 1585, 1114, 1766, 3221, 2643, 2739, 3920, 644, 1116, 645, 646, 647, 1801, 4279, 3762, 1637, 1509, 1119, 2965, 2369, 2695, 3293, 650, 651, 1120, 652, 1121, 3264, 655, 658, 659, 4035, 2910, 3391, 2808, 3099, 2913, 3676, 2852, 3284, 2731, 1609, 3994, 1319, 4467, 1802, 1227, 1623, 662, 663, 664, 1124, 1125, 1128, 1129, 668, 669, 1130, 670, 1131, 1527, 1132, 671, 1772, 1135, 672, 1933, 1731, 1793, 675, 676, 3342, 1138, 1139, 677, 679, 1142, 1143, 681, 1145, 682, 685, 3822, 689, 690, 691, 1147, 1601, 3905, 694, 695, 1414, 1150, 1795, 1372, 1695, 1866, 4115, 1719, 698, 1920, 699, 700, 1544, 4305, 1636, 1393, 2010, 3810, 4452, 3677, 4227, 1277, 1400, 4402, 4157, 4197, 1337, 1253, 1532, 4028, 3989, 1493, 1854, 1902, 1510, 4182, 706, 707, 708, 4476, 1245, 714, 1841, 4234, 1314, 4096, 717, 1155, 4217, 1156, 723, 1157, 1627, 725, 1159, 1953, 1160, 1201, 727, 3787, 3747, 730, 1846, 3815, 2005, 1964, 1822, 1262, 4480, 1537, 1291, 1318, 4294, 1582, 734, 3439, 2833, 4287, 4509, 4505, 4267, 3697, 3272, 4112, 2967, 3651, 1628, 3705, 1195, 3859, 1164, 1165, 1166, 1745, 1973, 1168, 3807, 4307, 1454, or 1781.

12. The VP capsid polypeptide of any one of claims 1-5, wherein X⁴ of SEQ ID NO: 5014 is K or R.

13. The VP capsid polypeptide of claim 12, wherein the 581 to 589 region of the VP capsid polypeptide has a sequence of any one of SEQ ID NOs: 739, 4177, 1289, 15, 743, 3477, 3051, 2982, 2877, 746, 3036, 3426, 3073, 3169, 3362, 2784, 3192, 1638, 25, 1703, 1836, 3660, 30, 32, 752, 1653, 2770, 2962, 4241, 4107, 2718, 3317, 4391, 4053, 3263, 2553, 3947, 2710, 2608, 3467, 2796, 2961, 2529, 3320, 2674, 2635, 3446, 3053, 3250, 3688, 1182, 3351, 2655, 3514, 2779, 3194, 3319, 3224, 3281, 3708, 2807, 3562, 3274, 3374, 3013, 3416, 2981, 3065, 2777, 3469, 2977, 2638, 2972, 3059, 2574, 3380, 4262, 3167, 3368, 2781, 3547, 3386, 1225, 2960, 3485, 3370, 3443, 2824, 1467, 3327, 3178, 3006, 3252, 2991, 3470, 2888, 2572, 3418, 2642, 2519, 3363, 2633, 757, 1952, 3122, 2551, 3718, 2216, 3484, 3577, 1308, 1230, 3960, 2994, 3080, 2589, 3681, 51, 761, 3925, 3654, 763, 764, 57, 4086, 1740, 767, 772, 2599, 2706, 70, 3865, 1549, 1361, 3882, 1942, 1312, 4501, 1413, 3593, 4043, 1806, 3908, 4397, 1615, 2006, 3945, 2854, 3523, 3669, 1356, 777, 4065, 84, 1484, 778, 87, 3891, 4456, 4040, 4496, 2001, 1478, 1189, 1490, 1885, 2270, 1180, 786, 4458, 1970, 1590, 98, 1298, 101, 1688, 794, 107, 1849, 797, 1579, 111, 112, 113, 1444, 801, 114, 115, 119, 120, 122, 1760, 123, 124, 806, 125, 126, 127, 128, 129, 130, 134, 811, 814, 139, 1326, 144, 816, 1302, 150, 152, 821, 160, 161, 162, 1651, 1483, 179, 180, 183, 185, 187, 1391, 198, 199, 831, 204, 833, 207, 3901, 3312, 2649, 1301, 4386, 3028, 1896, 1522, 3490, 216, 218, 1612, 225, 228, 229, 234, 239, 849, 850, 1536, 241, 246, 248, 855, 249, 252, 253, 261, 4966, 864, 263, 4749, 2296, 1241, 866, 268, 868, 269, 270, 873, 874, 1252, 273, 1591, 274, 1980, 878, 1539, 3601, 3877, 1930, 1420, 1678, 1460, 1799, 1374, 1290, 1354, 290, 2391, 4324, 294, 4138, 3903, 892, 3829, 298, 3844, 1436, 300, 1515, 1617, 1961, 303, 1589, 893, 4370, 3646, 4059, 1331, 1558, 1552, 320, 1958, 1491, 1635, 332, 3536, 2701, 2799, 3332, 3294, 3159, 3069, 2637, 3025, 2782, 3247, 3350, 2692, 2586, 3004, 3049, 2694, 2650, 3554, 2983, 3403, 3214, 3163, 2541, 3090, 3097, 3462, 2941, 3486, 2842, 3558, 3104, 3037, 3419, 2780, 2931, 1276, 2928, 2609, 3068, 3128, 2548, 2538, 2618, 2789, 3228, 2657, 3189, 2863, 3307, 3300, 2546, 3048, 3543, 2946, 2975, 3346, 3067, 2728, 2955, 3408, 3027, 3094, 3203, 2988, 2751, 2953, 2566, 2578, 2823, 3063, 3335, 3000, 3181, 3011, 3138, 3389, 2805, 3074, 2894, 3149, 2560, 3417, 3265, 3378, 2901, 2837, 2822, 2745, 3473, 3530, 3040, 2597, 3509, 3522, 3161, 2926, 3209, 3105, 3400, 2630, 2905, 2671, 2818, 2806, 2702, 2709, 3549, 3538, 2534, 2773, 2623, 3491, 3243, 3136, 2693, 3164, 3343, 2918, 2555, 2794, 2679, 3510, 3110, 2672, 3442, 2929, 3184, 3488, 3414, 3093, 2996, 3141, 3544, 3102, 2856, 2957, 3466, 3461, 2788, 2660, 3344, 3204, 2720, 3379, 2826, 2785, 3249, 3527, 3352, 2569, 4457, 2011, 3906, 1533, 1755, 1888, 4248, 1557, 3804, 1363, 1934, 1602, 3337, 3533, 2629, 3038, 2539, 3567, 3291, 3348, 3115, 3359, 2993, 3079, 3506, 2527, 2963, 2938, 2516, 3113, 1345, 2639, 3143, 3044, 2747, 3154, 3280, 3039, 2743, 2902, 3056, 2554, 2522, 3103, 3210, 3434, 2656, 4251, 4166, 4196, 3206, 3328, 2588, 3553, 2714, 3078, 3222, 3137, 3357, 2717, 2944, 3012, 3220, 3202, 2811, 3083, 3269, 3566, 2699, 2515, 3023, 2533, 3288, 3075, 3005, 2685, 3058, 2976, 2622, 3333, 3463, 2939, 3521, 3268, 3117, 2626, 2616, 3240, 2570, 3565, 2919, 3157, 2849, 3444, 2631, 3420, 2659, 3325, 3186, 2920, 3258, 3440, 3457, 3310, 2761, 3134, 2621, 3531, 2711, 2774, 2867, 2585, 3155, 2620, 3156, 2844, 3126, 3160, 2909, 3542, 3225, 2887, 3474, 3218, 2744, 2896, 3135, 3424, 3498, 3529, 2661, 2667, 2549, 2819, 2768, 2935, 3182, 2772, 3230, 3043, 2922, 3581, 3524, 2869, 2610, 3298, 2775, 3108, 2603, 3614, 2612, 2860, 3187, 3238, 3786, 3016, 3436, 2876, 2987, 3532, 3438, 3561, 3259, 2663, 2890, 3433, 3071, 3018, 2580, 2755, 3015, 2540, 3398, 2664, 2583, 2830, 2644, 2641, 3513, 2725, 2723, 3338, 3556, 2866, 2514, 2932, 2753, 2862, 2899, 2605, 2989, 3096, 3124, 2985, 2716, 3145, 3017, 2591, 2640, 3033, 1853, 3216, 3316, 3412, 2971, 3256, 3153, 3575, 3339, 2915, 2531, 3552, 3475, 3060, 3375, 2756, 3382, 2847, 2859, 3251, 3702, 3423, 2537, 2801, 3076, 2696, 3092, 3459, 3144, 3441, 2802, 3479, 2907, 3512, 3518, 3021, 2871, 3032, 2647, 2945, 3045, 2763, 3313, 3034, 3315, 3541, 2746, 2669, 2524, 3003, 2732, 3166, 3046, 3306, 2873, 3364, 3253, 3215, 3061, 2804, 2722, 2964, 2990, 2836, 4098, 4449, 3173, 2762, 3737, 2628, 3507, 2564, 3031, 2872, 3360, 2658, 2930, 2904, 3244, 3217, 3311, 3445, 2840, 3372, 2958, 3098, 3356, 3456, 3388, 2624, 3207, 2576, 2742, 2665, 2815, 3052, 3421, 2593, 3242, 2535, 2966, 2898, 2858, 2943, 2668, 2798, 3196, 2528, 2713, 3001, 2691, 2948, 2767, 2544, 3302, 2734, 2893, 2592, 2861, 3502, 2969, 2582, 3229, 2676, 2545, 3255, 3330, 2547, 3257, 2882, 3151, 3088, 2883, 3318, 2645, 2733, 2587, 3500, 3008, 2715, 2845, 3183, 2654, 3233, 3267, 2741, 2827, 2704, 3091, 2832, 2736, 3177, 3271, 2835, 2908, 3176, 2947, 3292, 3191, 2517, 3026, 3082, 3392, 3381, 2584, 2712, 3213, 3451, 2634, 3150, 2810, 3303, 2573, 3460, 2615, 3394, 2828, 3329, 4377, 4499, 3555, 2974, 3782, 3629, 3578, 3885, 2817, 3248, 2954, 3334, 3571, 3345, 3551, 3384, 3422, 1357, 1844, 2530, 1852, 3449, 3185, 3399, 2786, 3055, 3472, 3397, 2601, 3564, 3277, 4373, 3548, 3179, 3407, 3841, 3347, 3142, 4255, 4431, 3241, 3077, 2700, 3147, 2648, 3283, 2829, 3278, 2581, 2536, 4363, 2848, 3410, 2797, 2523, 2520, 2721, 3496, 2571, 3198, 3219, 3030, 2673, 2921, 3837, 3301, 3322, 2705, 3239, 2949, 3369, 3396, 2892, 2897, 2766, 3174, 3297, 2550, 2889, 2933, 2793, 2627, 2677, 3119, 2596, 3226, 3172, 3089, 2868, 2839, 3942, 3120, 3286, 2843, 3465, 1564, 3946, 4222, 1504, 3999, 2682, 1875, 3539, 3168, 2864, 3308, 3557, 2940, 3109, 3503, 2625, 3455, 3114, 2595, 3331, 2978, 2518, 2521, 4079, 3024, 3573, 2952, 2653, 1769, 3180, 2813, 2652, 2600, 2816, 3201, 3188, 3270, 2997, 2992, 3009, 3520, 2936, 3275, 3165, 3447, 3131, 3305, 2809, 2792, 2729, 2814, 2619, 3266, 2825, 3066, 2857, 2998, 3064, 2681, 3035, 3279, 2764, 3480, 3127, 2912, 3010, 2607, 3211, 3111, 3041, 1573, 3909, 4269, 3487, 3489, 2980, 3428, 3435, 3482, 3020, 2748, 2646, 2787, 2760, 2563, 3085, 3133, 3158, 3170, 2703, 3494, 2556, 2552, 3395, 3245, 3404, 2675, 2791, 1911, 1935, 2749, 3341, 3355, 2575, 2942, 2886, 2758, 2594, 3495, 2884, 3516, 3042, 2737, 2923, 3563, 2855, 3476, 2611, 2937, 3383, 3497, 3402, 2662, 2875, 3223, 2878, 3285, 2757, 3057, 2951, 3519, 2579, 2853, 3387, 3401, 3493, 3393, 1608, 3365, 2885, 3574, 3081, 3007, 3568, 3152, 3367, 3358, 3468, 3290, 3550, 3132, 2726, 2879, 3190, 3309, 2613, 2765, 3454, 2851, 2881, 3232, 3458, 3326, 3353, 2927, 3212, 2950, 3376, 3208, 3062, 3612, 3195, 3385, 2686, 2602, 3569, 3123, 2727, 2821, 2636, 2750, 2850, 3050, 2925, 3336, 3540, 2689, 3139, 2526, 3361, 3022, 3427, 3107, 3140, 3371, 3276, 2831, 3501, 2924, 3366, 3199, 3101, 3321, 3499, 2917, 2683, 2800, 2812, 3340, 3227, 3148, 3657, 4446, 1746, 2666, 3246, 3130, 3560, 3236, 2730, 3572, 1607, 3689, 2968, 1457, 1500, 1184, 3450, 2577, 2567, 2532, 3415, 2934, 2984, 2568, 4147, 3002, 2986, 910, 2979, 2542, 4472, 1472, 4057, 4507, 1711, 913, 916, 1594, 4440, 343, 918, 345, 348, 350, 1518, 3728, 3637, 3570, 3429, 2870, 2995, 4338, 3205, 2880, 3261, 1994, 3968, 4291, 4204, 4071, 352, 2820, 3912, 3287, 1218, 1190, 4145, 353, 355, 1782, 928, 3610, 358, 4224, 1918, 1959, 1840, 3736, 4155, 1543, 4049, 1633, 1495, 372, 1873, 1726, 1748, 4411, 4506, 4270, 4156, 3780, 4036, 4030, 4016, 1550, 3899, 1247, 1244, 4140, 3930, 4117, 4189, 4001, 3799, 3643, 3619, 4149, 1313, 3709, 1727, 3893, 1280, 3622, 1784, 3834, 1752, 3979, 4461, 4113, 3817, 4232, 3902, 1857, 1904, 1481, 1516, 3820, 3789, 4252, 4047, 4330, 4082, 4094, 3785, 3687, 4318, 4243, 3866, 1621, 4315, 1192, 1513, 1856, 3324, 2769, 2678, 3296, 375, 1395, 1584, 4093, 3940, 3778, 4374, 4210, 4009, 4264, 4368, 1610, 4194, 4474, 4013, 4266, 1759, 1922, 3663, 1642, 1185, 4356, 3932, 1233, 4212, 3858, 1198, 4192, 3790, 3712, 1969, 934, 1790, 1663, 1336, 3894, 1554, 1494, 1405, 3576, 4314, 3695, 3845, 4511, 3656, 1406, 1596, 4504, 1359, 1734, 3650, 1305, 1208, 1988, 4451, 1282, 4380, 1658, 1452, 1687, 3791, 4491, 4323, 4014, 1304, 1440, 4422, 3861, 1383, 3644, 3691, 4259, 1749, 4216, 1924, 1421, 1387, 3992, 4423, 4253, 1618, 1871, 1256, 3748, 1297, 1586, 1251, 1299, 1954, 3655, 3886, 4278, 4383, 4485, 1392, 3751, 3931, 3986, 3678, 1249, 4353, 4208, 3710, 4238, 4213, 3969, 4436, 3175, 4128, 2970, 1228, 3534, 3437, 3406, 3641, 3639, 3954, 4335, 3995, 3582, 4475, 3784, 4470, 4010, 3802, 3941, 4427, 4396, 4348, 3587, 3818, 3864, 3956, 3863, 3731, 3814, 4067, 4354, 3014, 4462, 4246, 4190, 4312, 4023, 3760, 3753, 1178, 3884, 2783, 4038, 3545, 2916, 3112, 2834, 3880, 3673, 4102, 4399, 4048, 3752, 4207, 1235, 3943, 4355, 4087, 4100, 4327, 4037, 4163, 3918, 4486, 1243, 3933, 4178, 3627, 3777, 1371, 3685, 1325, 1940, 4482, 4258, 3812, 1581, 1217, 3692, 4430, 3764, 4316, 4285, 3645, 3971, 4421, 1172, 4026, 2740, 3125, 3546, 1725, 1206, 3842, 4404, 3690, 3962, 4513, 4340, 4329, 4410, 3703, 4153, 2707, 3730, 4426, 4180, 4041, 3923, 4444, 3851, 4429, 4361, 1441, 4394, 4302, 3758, 4510, 3742, 1666, 1407, 4187, 1188, 1724, 1646, 4280, 1613, 4006, 1984, 1351, 3653, 3833, 2561, 4442, 3900, 4298, 1203, 4441, 3628, 3725, 937, 4447, 3776, 3658, 4064, 1324, 1367, 3594, 3680, 1300, 1987, 1862, 3998, 1380, 4185, 3686, 3696, 4463, 1350, 4008, 4230, 3853, 4244, 4083, 1546, 3613, 3273, 3452, 3525, 4105, 3835, 1263, 4020, 4144, 1224, 1199, 3667, 2778, 4412, 4407, 1812, 1810, 3823, 1416, 4333, 3146, 4281, 4211, 1979, 1456, 1239, 4167, 3740, 1876, 1388, 1967, 1474, 1471, 4176, 1232, 1989, 4125, 1741, 3585, 1174, 1396, 4061, 4015, 1207, 3698, 3825, 3922, 4021, 4181, 1598, 1916, 1429, 4502, 4231, 1321, 4390, 3693, 3734, 3635, 1768, 4025, 3976, 3840, 3963, 4286, 1502, 3836, 4161, 3659, 3743, 4130, 3605, 1385, 1783, 4392, 3826, 1473, 1883, 1834, 3984, 4495, 3910, 4160, 3671, 4184, 4132, 4250, 1503, 1237, 1523, 1417, 4063, 1562, 3977, 1971, 1707, 3769, 4074, 1534, 4239, 4003, 3915, 1689, 1776, 1410, 1823, 1498, 1329, 386, 3936, 4054, 4260, 4359, 4131, 4297, 4357, 4022, 3770, 4046, 1222, 3953, 4228, 4226, 4277, 1520, 1767, 1466, 1194, 4137, 1908, 1927, 1758, 3772, 3661, 4186, 4174, 1170, 1859, 4183, 1408, 1403, 941, 4033, 3623, 1826, 3719, 1931, 3584, 4004, 3591, 3967, 4168, 3957, 3878, 4165, 4191, 3980, 4058, 4200, 4336, 4322, 3991, 4106, 1641, 1570, 3978, 4154, 1365, 4257, 3846, 4345, 4379, 3603, 1693, 3937, 3801, 4201, 1898, 1845, 1226, 1220, 3745, 3988, 3975, 4236, 4075, 4146, 4256, 4308, 4000, 4148, 3588, 3868, 4403, 3883, 4326, 4393, 3895, 4237, 3955, 3727, 4005, 4489, 3982, 4437, 3597, 4342, 3872, 3987, 4490, 3876, 3668, 4300, 4042, 3648, 3996, 3800, 4367, 4099, 1807, 3887, 4428, 1884, 1682, 4364, 4306, 3869, 3600, 3914, 1968, 1670, 3811, 1865, 3961, 1506, 4221, 1376, 1379, 3768, 4225, 945, 394, 1714, 1422, 3618, 4433, 1965, 4471, 954, 4139, 1482, 3721, 1825, 1698, 1519, 1352, 4202, 4409, 1977, 1917, 405, 406, 3889, 413, 962, 418, 3675, 3974, 964, 420, 967, 968, 1897, 1272, 4133, 425, 4141, 430, 3749, 4044, 3590, 1944, 4126, 977, 4400, 1606, 980, 2604, 2895, 3448, 4563, 1692, 4055, 4358, 1664, 4309, 4045, 3854, 3682, 2688, 4366, 3425, 3231, 3649, 2759, 2724, 3873, 3755, 1216, 2754, 2606, 3471, 3234, 2565, 2803, 2562, 2684, 3411, 3405, 2690, 1255, 3985, 3535, 1306, 4084, 3282, 447, 1353, 1780, 449, 1485, 453, 1728, 454, 1696, 455, 3116, 1869, 457, 1386, 3879, 2698, 459, 1447, 4425, 1645, 467, 1488, 478, 1604, 1011, 4313, 4073, 4274, 1775, 2000, 2480, 1882, 1817, 1880, 1800, 4473, 3783, 3870, 1948, 3699, 1735, 3792, 4290, 492, 4090, 1019, 1803, 3642, 497, 500, 1333, 1890, 1024, 3608, 1864, 1531, 3636, 1699, 1028, 1366, 1030, 4027, 3478, 3763, 2959, 1293, 517, 3197, 1595, 3413, 2238, 1031, 1448, 1032, 1675, 1797, 3759, 1215, 4122, 3966, 528, 3911, 3289, 1821, 1874, 1037, 536, 1039, 3767, 3683, 540, 541, 1338, 1616, 1901, 1517, 2719, 3803, 4123, 4233, 3129, 3087, 3505, 4158, 1044, 3720, 4351, 4414, 1673, 3453, 3254, 1649, 543, 4240, 3580, 2598, 4062, 2841, 1049, 3515, 1433, 1323, 4301, 1051, 3738, 1270, 3857, 1056, 3662, 1057, 3981, 1063, 568, 570, 3620, 1064, 4002, 3964, 3707, 3666, 1348, 4273, 4497, 1401, 4438, 1895, 1912, 3939, 4170, 4056, 1221, 1654, 1067, 3934, 4080, 4352, 574, 3739, 1565, 3950, 1397, 3716, 1569, 1465, 4268, 1183, 3726, 3881, 4134, 4347, 4012, 3938, 4066, 4198, 4416, 4164, 3630, 4325, 4375, 4371, 4432, 4215, 1753, 3944, 1409, 4195, 4455, 4512, 3750, 3633, 4070, 4104, 4162, 4235, 4346, 1572, 4443, 3761, 1346, 3592, 1891, 4469, 1275, 577, 1963, 4129, 1296, 1360, 3733, 4111, 3993, 4108, 3949, 1556, 1435, 1424, 1830, 1197, 1254, 4120, 1545, 4417, 1469, 1292, 4293, 1827, 3839, 3983, 4395, 4295, 3715, 3855, 3609, 4076, 4175, 3927, 1650, 4299, 1773, 2004, 1267, 1364, 4007, 3729, 3665, 3722, 1712, 1751, 3924, 3952, 1343, 4114, 1704, 4448, 1786, 3354, 586, 3432, 2891, 587, 1903, 2077, 1080, 1563, 2274, 595, 2559, 2590, 2738, 4478, 4069, 1327, 4150, 3260, 3481, 3672, 3625, 2008, 4439, 3852, 3997, 1411, 1268, 4050, 3377, 4424, 1496, 4143, 4493, 3492, 1962, 1412, 4017, 4477, 1794, 4263, 3072, 2199, 3888, 604, 605, 1368, 3827, 4103, 607, 1571, 1438, 3701, 4389, 4897, 1603, 2154, 1715, 4369, 1652, 1733, 4218, 1798, 621, 1667, 1384, 3700, 1788, 1600, 1102, 1423, 2771, 1339, 3070, 2557, 2795, 2906, 3299, 3118, 4779, 2028, 1614, 1947, 630, 4479, 3766, 1106, 634, 1108, 635, 638, 3706, 3735, 3390, 3431, 2838, 3483, 3464, 3848, 2558, 3314, 3086, 3029, 2956, 3517, 2651, 2914, 2680, 2632, 3121, 3100, 3528, 3526, 3084, 4220, 3304, 2846, 3235, 2903, 3559, 2687, 3409, 3237, 2900, 2999, 3349, 3171, 2752, 3262, 3504, 3047, 4376, 3193, 3430, 2525, 2670, 2911, 3508, 2776, 2697, 3200, 2790, 3323, 2543, 2874, 2614, 3904, 3373, 3054, 2617, 4242, 3621, 2708, 4179, 1269, 3095, 1286, 3624, 4481, 3511, 2735, 4381, 3295, 1585, 3221, 2643, 2739, 3920, 1801, 4279, 2502, 1117, 2965, 2695, 3293, 3264, 2076, 657, 2910, 3391, 2808, 3099, 2913, 3676, 2852, 3284, 2731, 1609, 3537, 3994, 1319, 4467, 1802, 1227, 1623, 667, 1133, 1134, 673, 1933, 1731, 1793, 3342, 683, 1146, 687, 3822, 1601, 692, 3905, 1414, 696, 1695, 4115, 701, 1544, 702, 703, 4031, 2010, 3810, 4452, 3677, 4227, 4402, 4157, 4197, 1337, 1253, 1532, 1493, 1854, 1510, 705, 1153, 4476, 1375, 712, 1245, 715, 4234, 1154, 1314, 4096, 720, 1311, 721, 722, 4217, 726, 3815, 2005, 1964, 1262, 4480, 4294, 1582, 3439, 2833, 4287, 4509, 3272, 4112, 2967, 3651, 1991, 1805, 1628, 3705, 1195, 3859, 3807, 4307, 1454, or 1781.

14. The VP capsid polypeptide of any one of claims 1-5, wherein X⁵ of SEQ ID NO: 5014 is K or R.

15. The VP capsid polypeptide of claim 14, wherein the 581 to 589 region of the VP capsid polypeptide has a sequence of any one of SEQ ID NOs: 2498, 4177, 742, 16, 17, 18, 745, 3477, 1548, 2982, 3426, 3073, 3169, 747, 3362, 4942, 23, 28, 2038, 3660, 750, 31, 32, 1640, 34, 37, 4925, 1205, 4288, 4053, 3263, 2553, 3947, 2710, 2608, 3467, 2796, 2961, 2529, 3320, 2674, 2635, 3446, 3053, 3688, 4320, 3708, 2807, 3562, 3274, 3374, 3013, 3416, 2981, 3065, 2777, 3469, 2977, 2638, 2972, 3059, 2574, 3380, 4262, 3167, 3368, 1225, 3178, 3006, 3252, 2991, 2642, 2519, 3363, 2633, 42, 755, 44, 756, 46, 1952, 758, 2410, 2551, 3718, 1308, 1230, 3960, 1378, 2589, 3681, 760, 53, 4951, 4591, 762, 3925, 55, 3654, 763, 60, 61, 4086, 1740, 766, 1966, 63, 2041, 64, 769, 770, 2384, 771, 65, 772, 2197, 68, 3816, 69, 2599, 70, 3865, 1549, 3882, 75, 4501, 76, 774, 1413, 776, 3757, 3593, 4043, 4397, 4415, 3754, 1470, 4360, 3945, 2854, 3523, 3669, 1356, 81, 82, 4065, 83, 84, 1294, 87, 3891, 4456, 4040, 1189, 1490, 90, 92, 782, 94, 1831, 1867, 4458, 1936, 100, 792, 2007, 4556, 795, 104, 106, 1849, 2509, 110, 1906, 798, 2359, 2461, 4864, 1344, 116, 120, 121, 803, 1463, 805, 1760, 123, 124, 806, 127, 2085, 130, 132, 809, 1978, 134, 813, 139, 815, 1326, 141, 142, 145, 4816, 1302, 817, 146, 818, 148, 149, 4546, 150, 153, 156, 157, 163, 164, 166, 169, 823, 824, 1483, 175, 177, 178, 179, 826, 827, 182, 183, 829, 184, 185, 190, 191, 192, 2361, 195, 1391, 197, 2223, 201, 202, 4775, 1334, 837, 3901, 3312, 212, 4386, 3028, 213, 1446, 214, 215, 1896, 3490, 217, 219, 223, 225, 2088, 4542, 226, 227, 230, 843, 844, 237, 845, 239, 849, 852, 1536, 854, 244, 245, 248, 855, 251, 253, 255, 257, 858, 860, 262, 863, 4535, 865, 264, 1241, 265, 1477, 267, 867, 1252, 273, 275, 1980, 277, 281, 1892, 879, 1539, 881, 1295, 282, 285, 1626, 2082, 1374, 1620, 4564, 289, 887, 888, 889, 4324, 293, 4138, 296, 3903, 892, 3829, 298, 301, 302, 1589, 4370, 2342, 309, 4059, 310, 1779, 1558, 1552, 317, 320, 898, 321, 2016, 2134, 324, 325, 327, 1635, 4484, 1756, 4609, 332, 4635, 3069, 2637, 3025, 2782, 3247, 3350, 2692, 2586, 3214, 3163, 2541, 3090, 3097, 3462, 3037, 3419, 2780, 2931, 1276, 2789, 3228, 2657, 3189, 2975, 3346, 3067, 2728, 2955, 3408, 3027, 3094, 3203, 2988, 2751, 2953, 2566, 2578, 2901, 2837, 2822, 2745, 3473, 3530, 3040, 2597, 3509, 3522, 3161, 2926, 3209, 3105, 3400, 2630, 2905, 2671, 2818, 2806, 2534, 2773, 2623, 3491, 3243, 3136, 2693, 3164, 2679, 3510, 3110, 2672, 3442, 2929, 3184, 3488, 3102, 3466, 3461, 2788, 2660, 3344, 2720, 3379, 2826, 3249, 3527, 4460, 3352, 4319, 3906, 4248, 3804, 1363, 1404, 4349, 4166, 4196, 3206, 3328, 2588, 3553, 2714, 3078, 3222, 3137, 3357, 2717, 2944, 3012, 3220, 3202, 2811, 3083, 3269, 3566, 2699, 2515, 3023, 2533, 3288, 3075, 3005, 2685, 3058, 2976, 2622, 3333, 3463, 2939, 3521, 3268, 3117, 2626, 2616, 3240, 2570, 3565, 2919, 3157, 2849, 3444, 2631, 3420, 2659, 3325, 3186, 2920, 3258, 3440, 3457, 3310, 2761, 3134, 2621, 3531, 2711, 2774, 2867, 2585, 3155, 2620, 3156, 2844, 3126, 3160, 2909, 3542, 3225, 2887, 3474, 3218, 2744, 2896, 3135, 3424, 3498, 3529, 2661, 2667, 2549, 2819, 2768, 2935, 3182, 3092, 3459, 3144, 3441, 2802, 3479, 2907, 3512, 3518, 3021, 2871, 3032, 2647, 2945, 3045, 2763, 3313, 3034, 3315, 3541, 2746, 2669, 2524, 3003, 2732, 3166, 3046, 3306, 2873, 3364, 3253, 3215, 3061, 2804, 2722, 2964, 2990, 2836, 4098, 4449, 3173, 2762, 3737, 2628, 3507, 2564, 3031, 2872, 3360, 2658, 2930, 2904, 3244, 3217, 3311, 3445, 2840, 3372, 2958, 3098, 3356, 3456, 3388, 2624, 3207, 2576, 2742, 2665, 2815, 3052, 3421, 2593, 3242, 2535, 2966, 2898, 2858, 2943, 2668, 2798, 3196, 2528, 2713, 3001, 2691, 2948, 2767, 2544, 3302, 2734, 2893, 2592, 2861, 3502, 2969, 2582, 3229, 2676, 2545, 3255, 3330, 2547, 3257, 2882, 3151, 3088, 2883, 3318, 2645, 2733, 2587, 3500, 3008, 2715, 2845, 3183, 2654, 3233, 3267, 2741, 2827, 2704, 3091, 2832, 2736, 3177, 3271, 2835, 2908, 3176, 2947, 3292, 3191, 2517, 3026, 3082, 3392, 3782, 3629, 3578, 3885, 4081, 1764, 1852, 4431, 3241, 3077, 2700, 3147, 2648, 3283, 2829, 3278, 2581, 2536, 4363, 2848, 3410, 2797, 2523, 2520, 2721, 3496, 2571, 3198, 3219, 3030, 2673, 2921, 3837, 3301, 3322, 2705, 3239, 2949, 3369, 3396, 2892, 2897, 2766, 3174, 3297, 2550, 2889, 2933, 2793, 2627, 2677, 3119, 2596, 3226, 3172, 3089, 2868, 2839, 3942, 4222, 1504, 3180, 2813, 2652, 2600, 2816, 3201, 3188, 3270, 2997, 2992, 3009, 3520, 2936, 3275, 3165, 3447, 3131, 3305, 2809, 2792, 2729, 2814, 2619, 3266, 2825, 3066, 2857, 2998, 3064, 2681, 3035, 3279, 2764, 3480, 3127, 2912, 3010, 2607, 3211, 3111, 3909, 4269, 3019, 1415, 3020, 2748, 2646, 2787, 2760, 3158, 3170, 2703, 3494, 3404, 2675, 2749, 3341, 3355, 2594, 3495, 2884, 3516, 3042, 2737, 2923, 3563, 2855, 3476, 2611, 2937, 3383, 2875, 3223, 2878, 1808, 2951, 3519, 2579, 2853, 3387, 3401, 3007, 3568, 3152, 3367, 3358, 336, 3290, 3550, 3309, 2613, 2765, 1355, 2881, 3232, 3458, 3326, 3353, 2927, 3212, 2950, 3376, 3208, 3062, 3612, 3195, 3385, 2686, 1622, 3361, 3022, 3427, 3107, 3140, 3371, 3276, 2831, 3501, 2924, 3366, 3199, 3101, 3321, 3499, 2917, 2683, 1464, 3560, 3236, 2730, 3572, 1607, 909, 2577, 2567, 2532, 3415, 2934, 2984, 2568, 3002, 2338, 4472, 1472, 1529, 4507, 1583, 340, 912, 2013, 913, 2277, 1594, 4440, 917, 343, 344, 345, 346, 350, 351, 4498, 3637, 3570, 3429, 4091, 4338, 3205, 2880, 3261, 3968, 4291, 4204, 4034, 2820, 3912, 3287, 1218, 1190, 4145, 354, 3610, 4224, 1840, 3736, 1770, 4155, 932, 363, 1279, 2156, 1722, 368, 1566, 370, 4967, 372, 1211, 2494, 1726, 1748, 1191, 4039, 4411, 4506, 4270, 4156, 3780, 1550, 3899, 1181, 3919, 1639, 3664, 4189, 4001, 3799, 1240, 1686, 1479, 1307, 1575, 4296, 1665, 3871, 1605, 4408, 4149, 3741, 3893, 1280, 1983, 3979, 3817, 1489, 4214, 3902, 1857, 1904, 3820, 3789, 4252, 4330, 4082, 3785, 3687, 4243, 3704, 4172, 4315, 1192, 2769, 2678, 3296, 2343, 4093, 4453, 3940, 3778, 4374, 4339, 4368, 4194, 4474, 4013, 1771, 1759, 3860, 3832, 1381, 4356, 1233, 4212, 3858, 1198, 3611, 1919, 1819, 3790, 1969, 4247, 1790, 3894, 1554, 3576, 4314, 1851, 1850, 4511, 3656, 3638, 1406, 1443, 1661, 4504, 3831, 4435, 1208, 1988, 3849, 1835, 4380, 4024, 4491, 4323, 4014, 1511, 1981, 1676, 1547, 1383, 3644, 3691, 4259, 1176, 4216, 1924, 1387, 4423, 1256, 4119, 1251, 3990, 4029, 4097, 3890, 3796, 4343, 1202, 4413, 4384, 3808, 3892, 3926, 3756, 4405, 4109, 1210, 4492, 3969, 4436, 3175, 4128, 2970, 1228, 3534, 3437, 3784, 4470, 4010, 4334, 3821, 4171, 3824, 3631, 4494, 1320, 1204, 1223, 1284, 1685, 3760, 3753, 1178, 3884, 2783, 4038, 3545, 2916, 3112, 2834, 3880, 3673, 4102, 4100, 4327, 3634, 3617, 4445, 4303, 1370, 3838, 1187, 3615, 3746, 3935, 1941, 4419, 1171, 3670, 3777, 936, 3685, 1325, 1940, 4482, 4258, 3812, 4124, 4508, 4500, 3652, 3972, 1630, 4421, 1172, 4026, 2740, 3125, 3546, 4513, 4340, 1763, 1487, 3589, 3907, 4041, 3851, 4077, 4187, 1193, 1196, 1724, 1717, 1200, 1975, 1613, 4006, 3653, 3833, 1593, 4442, 3900, 4388, 1820, 4317, 4249, 3628, 3794, 4447, 3776, 3658, 1377, 4011, 4272, 3594, 4185, 3686, 3696, 1350, 4230, 3853, 4244, 1909, 3897, 1546, 3273, 3452, 3525, 4105, 3835, 383, 1263, 1492, 3856, 3586, 1175, 4144, 1224, 1199, 3667, 2778, 4412, 1507, 3146, 4281, 1179, 3843, 3740, 1388, 1474, 1342, 1471, 4176, 1741, 1508, 4378, 1212, 4015, 1207, 3698, 3825, 4231, 3806, 3896, 3963, 4286, 3743, 4130, 3605, 4173, 4265, 1246, 1737, 3826, 1473, 1992, 1883, 1656, 3671, 4063, 1847, 4239, 3915, 1265, 1498, 1329, 3874, 4261, 1791, 3579, 4359, 4131, 4297, 4357, 4046, 3788, 4169, 1925, 4228, 4101, 1889, 1369, 4088, 4019, 1194, 3772, 3850, 1315, 1530, 1859, 4183, 1408, 4033, 3623, 1928, 1459, 1765, 4004, 3591, 3967, 4168, 3957, 3878, 3980, 3958, 4051, 3798, 4032, 3991, 4106, 1641, 4464, 3813, 4257, 3846, 4345, 1787, 1214, 4483, 4201, 1220, 3867, 3640, 3916, 1209, 4236, 4075, 4146, 4256, 4308, 4000, 4148, 3588, 3883, 4326, 4092, 4283, 1553, 3805, 4151, 1281, 1681, 4489, 3982, 4437, 3597, 4342, 3987, 3583, 3647, 389, 4304, 3793, 1937, 3996, 3800, 4367, 4099, 1390, 4364, 4306, 1278, 1672, 1542, 1915, 3600, 3948, 3811, 1362, 4276, 1445, 1721, 1632, 3607, 1317, 1778, 1668, 391, 4406, 4341, 1480, 393, 394, 395, 946, 3618, 4433, 1177, 947, 950, 400, 4471, 401, 402, 954, 3602, 4434, 3721, 1825, 4202, 4409, 406, 1631, 1684, 3889, 410, 412, 2352, 1905, 417, 418, 3675, 1833, 3974, 419, 964, 420, 421, 969, 4733, 1272, 971, 423, 3830, 973, 426, 1708, 428, 4141, 3749, 1619, 975, 4044, 3590, 1706, 4400, 979, 2895, 3448, 438, 982, 2433, 983, 442, 3862, 2435, 443, 4309, 4045, 3854, 3682, 444, 445, 4366, 3425, 3231, 3649, 2759, 2724, 3873, 3599, 3775, 3471, 3234, 2565, 2803, 2562, 2684, 3411, 3405, 2690, 3694, 446, 3985, 3535, 4084, 3282, 988, 2107, 990, 451, 452, 453, 992, 993, 1696, 996, 3116, 1386, 999, 458, 3879, 460, 461, 462, 2339, 1003, 4425, 1645, 1004, 466, 2328, 468, 1231, 1468, 2496, 473, 474, 2108, 1273, 1007, 1744, 1659, 478, 1009, 1012, 4313, 482, 1499, 484, 2513, 2205, 4592, 1458, 4274, 2122, 4905, 4205, 2000, 488, 1894, 3917, 3616, 4311, 4085, 4401, 1310, 3783, 1538, 3870, 1948, 3699, 1735, 3792, 2202, 4090, 2378, 2012, 3642, 1020, 2302, 4665, 4781, 500, 1022, 1023, 4686, 505, 507, 508, 509, 1025, 1732, 1816, 3636, 1028, 516, 1366, 4572, 2489, 1261, 4027, 3763, 2959, 1293, 3197, 1448, 1032, 519, 2420, 522, 3759, 1215, 4122, 1730, 524, 526, 3966, 1035, 527, 528, 529, 530, 531, 1036, 532, 533, 536, 537, 3767, 1929, 1041, 3683, 1043, 4906, 542, 1338, 1796, 4331, 4332, 4466, 3803, 3087, 3505, 1449, 1044, 4414, 3453, 3254, 544, 546, 1045, 547, 4240, 3580, 4680, 549, 550, 2598, 551, 3819, 1259, 4062, 554, 1049, 1050, 1433, 555, 1052, 1053, 3738, 3857, 2089, 1056, 2193, 1257, 1238, 3662, 1059, 1060, 4203, 3981, 1303, 4116, 567, 569, 3620, 4002, 3679, 3707, 4497, 4438, 1264, 3939, 4170, 4056, 1271, 1451, 1654, 3934, 4080, 4352, 574, 3739, 1565, 1419, 3950, 3716, 1465, 3726, 3881, 4134, 4347, 4012, 3938, 4066, 4164, 3630, 4229, 4292, 4215, 1729, 4223, 4455, 4512, 3633, 4070, 4104, 4162, 4443, 3761, 1587, 3592, 1891, 4469, 1963, 4129, 1360, 3949, 1861, 4120, 1292, 4293, 3839, 3983, 3928, 4295, 3715, 3855, 3609, 1990, 4007, 3722, 1624, 3924, 3952, 580, 2003, 1343, 582, 4114, 1818, 1704, 4448, 584, 1078, 1786, 585, 1832, 586, 2891, 587, 4936, 1082, 4459, 2113, 590, 2308, 593, 1858, 597, 2738, 4150, 3260, 3481, 4439, 1268, 4050, 3377, 4424, 3492, 1412, 4477, 4263, 3072, 2009, 3888, 3827, 4103, 1438, 609, 610, 611, 3701, 4389, 613, 4369, 617, 1921, 1373, 1870, 4218, 1099, 1702, 4801, 623, 3700, 1788, 625, 4878, 1423, 1339, 3875, 628, 2557, 2906, 2029, 4876, 1103, 631, 4479, 3766, 632, 1104, 1105, 634, 4651, 1108, 1813, 636, 638, 641, 4581, 1112, 2164, 3735, 3390, 2558, 3314, 3086, 3029, 2956, 3517, 2651, 2914, 2680, 2632, 3121, 3100, 3528, 3526, 3084, 4220, 2752, 3262, 3504, 3047, 4376, 3193, 3430, 2525, 2670, 2911, 3508, 2776, 2697, 3200, 2790, 3323, 2543, 2874, 2614, 3904, 3373, 3054, 2617, 4242, 3621, 4398, 1269, 3624, 4481, 1432, 3295, 1568, 1766, 2643, 2739, 4760, 1115, 3920, 644, 645, 646, 4279, 3762, 1637, 1509, 2200, 1117, 4780, 2965, 2695, 650, 651, 653, 654, 655, 658, 4035, 2910, 3391, 2808, 3676, 2852, 3284, 3537, 1319, 4467, 1802, 1227, 660, 4812, 2364, 1124, 1125, 665, 4917, 1127, 1129, 1132, 1133, 2236, 673, 4557, 1136, 1139, 678, 4737, 4531, 679, 680, 1144, 681, 4525, 2415, 685, 2445, 3822, 690, 691, 1601, 4621, 3905, 695, 1149, 696, 2027, 2160, 1795, 1372, 4115, 2194, 1920, 4031, 1393, 1277, 1400, 4402, 4157, 4028, 704, 1902, 1510, 4182, 1153, 4476, 2053, 710, 1375, 715, 4096, 717, 1155, 719, 1311, 722, 4217, 1156, 723, 1157, 1627, 4566, 1158, 724, 725, 1953, 1201, 3787, 3747, 1846, 3815, 1822, 1537, 1318, 4294, 733, 734, 3439, 2833, 4505, 4267, 3697, 4112, 2967, 3651, 1805, 1163, 3859, 2275, 737, 1167, 1745, 3807, or 4307.

16. The VP capsid polypeptide of any one of claims 1-5, wherein X⁶ of SEQ ID NO: 5014 is K or R.

17. The VP capsid polypeptide of claim 16, wherein the 581 to 589 region of the VP capsid polypeptide has a sequence of any one of SEQ ID NOs: 738, 4177, 1289, 740, 14, 743, 744, 17, 3477, 1548, 3051, 2982, 2877, 746, 19, 3036, 3426, 3073, 3169, 747, 3362, 2784, 21, 3192, 22, 1638, 748, 24, 749, 27, 1703, 1836, 28, 3660, 29, 750, 1640, 33, 35, 36, 1653, 1205, 3795, 753, 4288, 4219, 2770, 2962, 4241, 4107, 2718, 3317, 4391, 3263, 2553, 3947, 2710, 2608, 3467, 2796, 2961, 2529, 3320, 2674, 2635, 3446, 3053, 3250, 3688, 1998, 4320, 3351, 2655, 3514, 2779, 3194, 3319, 3224, 3281, 3708, 2807, 3562, 3274, 3374, 3013, 3416, 2981, 3065, 2777, 3469, 2977, 2638, 2972, 3059, 2574, 3380, 4262, 3167, 3368, 2781, 3547, 3386, 1225, 2960, 3485, 3370, 3443, 2824, 1467, 3327, 3178, 3006, 3252, 2991, 3470, 2888, 2572, 3418, 2642, 2519, 3363, 40, 2633, 44, 45, 756, 47, 48, 1952, 3122, 2551, 3718, 3484, 3577, 1308, 3960, 1378, 2994, 3080, 2589, 3681, 51, 760, 762, 3925, 3654, 763, 59, 60, 4086, 1740, 1660, 62, 1966, 63, 2438, 768, 66, 67, 68, 3816, 2599, 2706, 72, 73, 74, 3865, 1549, 1361, 3882, 773, 3713, 1942, 1312, 4501, 76, 1413, 775, 1560, 4289, 3757, 3593, 3908, 4397, 4415, 3723, 3754, 4360, 3945, 2854, 3523, 3669, 1356, 4065, 1294, 1484, 85, 86, 3891, 4456, 4040, 4496, 1982, 2001, 1478, 1189, 1490, 1885, 1926, 89, 780, 1180, 92, 781, 782, 783, 786, 94, 95, 788, 1831, 1867, 96, 4458, 97, 1970, 1936, 1590, 98, 99, 789, 790, 1298, 1688, 791, 792, 2007, 102, 103, 104, 105, 107, 108, 1579, 1906, 111, 798, 112, 799, 800, 1444, 801, 114, 115, 1344, 116, 802, 117, 118, 119, 121, 803, 1463, 1760, 806, 126, 128, 807, 129, 131, 808, 133, 1978, 811, 812, 135, 136, 137, 138, 814, 140, 1326, 141, 142, 143, 2344, 816, 1634, 1302, 817, 818, 147, 148, 149, 150, 151, 154, 155, 819, 820, 156, 157, 158, 161, 162, 165, 822, 168, 169, 170, 823, 172, 1651, 173, 1483, 174, 825, 176, 178, 180, 827, 181, 828, 4911, 184, 186, 188, 189, 830, 192, 193, 194, 196, 1391, 198, 199, 200, 201, 202, 203, 205, 832, 206, 834, 207, 208, 209, 210, 835, 836, 1334, 3901, 3312, 2649, 1450, 4386, 3028, 1446, 1522, 3490, 217, 219, 1612, 220, 221, 222, 839, 223, 840, 224, 225, 228, 229, 230, 231, 842, 232, 233, 234, 238, 847, 239, 850, 851, 853, 1536, 240, 241, 242, 243, 244, 245, 247, 250, 251, 254, 255, 857, 256, 258, 259, 859, 260, 861, 862, 864, 263, 2318, 865, 2326, 264, 1241, 266, 1477, 867, 268, 868, 269, 270, 869, 870, 271, 871, 872, 272, 873, 1252, 1591, 875, 274, 275, 276, 876, 877, 277, 278, 280, 1892, 1539, 881, 3601, 3877, 1460, 282, 1799, 284, 1626, 286, 1374, 1620, 1290, 1354, 887, 1956, 889, 292, 4324, 4138, 891, 296, 3903, 297, 3829, 3809, 4271, 3844, 1436, 300, 1617, 1961, 302, 304, 305, 2147, 1589, 4370, 307, 3646, 4059, 1431, 1331, 312, 1779, 313, 896, 1558, 1552, 318, 319, 322, 1958, 323, 324, 901, 1491, 328, 329, 4484, 907, 3536, 2701, 2799, 3332, 3294, 3159, 3069, 2637, 3025, 2782, 3247, 3350, 2692, 2586, 3004, 3049, 2694, 2650, 3554, 2983, 3403, 3214, 3163, 2541, 3090, 3097, 3462, 1430, 2941, 3486, 2842, 3558, 3104, 3037, 3419, 2780, 2931, 1276, 2928, 2609, 3068, 3128, 2548, 2538, 2618, 2789, 3228, 2657, 3189, 2863, 3307, 3300, 2546, 3048, 3543, 2946, 2975, 3346, 3067, 2728, 2955, 3408, 3027, 3094, 3203, 2988, 2751, 2953, 2566, 2578, 2823, 3063, 3335, 3000, 3181, 3011, 3138, 3389, 2805, 3074, 2894, 3149, 2560, 3417, 3265, 3378, 2901, 2837, 2822, 2745, 3473, 3530, 3040, 2597, 3509, 3522, 3161, 2926, 3209, 3105, 3400, 2630, 2905, 2671, 2818, 2806, 2702, 2709, 3549, 3538, 2534, 2773, 2623, 3491, 3243, 3136, 2693, 3164, 3343, 2918, 2555, 2794, 2679, 3510, 3110, 2672, 3442, 2929, 3184, 3488, 3414, 3093, 2996, 3141, 3544, 3102, 2856, 2957, 3466, 3461, 2788, 2660, 3344, 3204, 2720, 3379, 2826, 1789, 2785, 3249, 3527, 4460, 3352, 2569, 4457, 2011, 4319, 3906, 1533, 1755, 4248, 1557, 3804, 1602, 4188, 1330, 4349, 3337, 3533, 2629, 3038, 2539, 3567, 3291, 3348, 3115, 3359, 2993, 3079, 3506, 2527, 2963, 2938, 2516, 3113, 2639, 3143, 3044, 2747, 3154, 3280, 3039, 2743, 2902, 3056, 2554, 2522, 3103, 3210, 3434, 2656, 4251, 2588, 3553, 2714, 3078, 3222, 3137, 3357, 2717, 2944, 3012, 3220, 3202, 2811, 3083, 3269, 3566, 2699, 2515, 3023, 2533, 3288, 3075, 3005, 2685, 3058, 2976, 2622, 3333, 3463, 2939, 3521, 3268, 3117, 2626, 2616, 3240, 2570, 3565, 2919, 3157, 2849, 3444, 2631, 3420, 2659, 3325, 3186, 2920, 3258, 3440, 3457, 3310, 2761, 3134, 2621, 3531, 2711, 2774, 2867, 2585, 3155, 2620, 3156, 2844, 3126, 3160, 2909, 3542, 3225, 2887, 3474, 3218, 2744, 2896, 3135, 3424, 3498, 3529, 2661, 2667, 2549, 2819, 2768, 2935, 3182, 2772, 3230, 3043, 2922, 3581, 2869, 2610, 3298, 2775, 3108, 2603, 2612, 2860, 3187, 3238, 3786, 4385, 3016, 3436, 2876, 2987, 3532, 3438, 3561, 3259, 2663, 2890, 3433, 3071, 3018, 2580, 2755, 3015, 2540, 3398, 2664, 2583, 2830, 2644, 2641, 3513, 2725, 2723, 3338, 3556, 2866, 2514, 2932, 2753, 2862, 2899, 2605, 2989, 3096, 3124, 2985, 2716, 3145, 3017, 2591, 2640, 3033, 3316, 3412, 2971, 3256, 3153, 3575, 3339, 2915, 2531, 3552, 3475, 3060, 3375, 2756, 3382, 2847, 2859, 3251, 3702, 3423, 2537, 2801, 3076, 2696, 3459, 3144, 3441, 2802, 3479, 2907, 3512, 3518, 3021, 2871, 3032, 2647, 2945, 3045, 2763, 3313, 3034, 3315, 3541, 2746, 2669, 2524, 3003, 2732, 3166, 3046, 3306, 2873, 3364, 3253, 3215, 3061, 2804, 2722, 2964, 2990, 2836, 3173, 2762, 3737, 2628, 3507, 2564, 3031, 2872, 3360, 2658, 2930, 2904, 3244, 3217, 3311, 3445, 2840, 3372, 2958, 3098, 3356, 3456, 3388, 2624, 3207, 2576, 2742, 2665, 2815, 3052, 3421, 2593, 3242, 2535, 2966, 2898, 2858, 2943, 2668, 2798, 3196, 2528, 2713, 3001, 2691, 2948, 2767, 2544, 3302, 2734, 2893, 2592, 2861, 3502, 2969, 2582, 3229, 2676, 2545, 3255, 3330, 2547, 3257, 2882, 3151, 3088, 2883, 3318, 2645, 2733, 2587, 3500, 3008, 2715, 2845, 3183, 2654, 3233, 3267, 2741, 2827, 2704, 3091, 2832, 2736, 3177, 3271, 2835, 2908, 3176, 2947, 3292, 3191, 2517, 3026, 3082, 3392, 2584, 2712, 3213, 3451, 2634, 3150, 2810, 3303, 2573, 3460, 2615, 3394, 2828, 3329, 4377, 4499, 3555, 2974, 3629, 3578, 3885, 2817, 3248, 2954, 3334, 3571, 3345, 3551, 3384, 3422, 2530, 2973, 4418, 4081, 3951, 1764, 1671, 1843, 3449, 3185, 3399, 2786, 3055, 3472, 3397, 2601, 3564, 3277, 3548, 3179, 3407, 3841, 3347, 3142, 3241, 3077, 2700, 3147, 2648, 3283, 2829, 3278, 2581, 2536, 4363, 2848, 3410, 2797, 2523, 2520, 2721, 3496, 2571, 3198, 3219, 3030, 2673, 2921, 3301, 3322, 2705, 3239, 2949, 3369, 3396, 2892, 2897, 2766, 3174, 3297, 2550, 2889, 2933, 2793, 2627, 2677, 3119, 2596, 3226, 3172, 3089, 2868, 2839, 3120, 3286, 2843, 3465, 3946, 2682, 2865, 3539, 3168, 2864, 3308, 3557, 2940, 3109, 3503, 2625, 3455, 3114, 2595, 3331, 2978, 2518, 2521, 4079, 3024, 3573, 2952, 2653, 3180, 2813, 2652, 2600, 2816, 3201, 3188, 3270, 2997, 2992, 3009, 3520, 2936, 3275, 3165, 3447, 3131, 3305, 2809, 2792, 2729, 2814, 2619, 3266, 2825, 3066, 2857, 2998, 3064, 2681, 3035, 3279, 2764, 3480, 3127, 2912, 3010, 2607, 3211, 3111, 3041, 4269, 3487, 3489, 3019, 1266, 1415, 2980, 3428, 3435, 3482, 3020, 2748, 2646, 2787, 2760, 2563, 3085, 3133, 3158, 3170, 2703, 3494, 2556, 2552, 3395, 3245, 3404, 2675, 2791, 1911, 908, 1935, 2749, 3341, 3355, 2575, 2942, 2886, 2758, 2594, 3495, 2884, 3516, 3042, 2737, 2923, 3563, 2855, 3476, 2611, 2937, 3383, 3497, 3402, 3162, 2662, 2875, 3223, 2878, 1808, 3285, 2757, 3057, 2951, 3519, 2579, 2853, 3387, 3401, 3493, 3393, 1608, 3365, 2885, 3574, 3081, 3007, 3568, 3152, 3367, 3358, 336, 3468, 3290, 3550, 3132, 2726, 2879, 3190, 3309, 2613, 2765, 3106, 1355, 3454, 2851, 2881, 3232, 3458, 3326, 3353, 2927, 3212, 2950, 3376, 3208, 3062, 3612, 3195, 3385, 2686, 2602, 3569, 3123, 2727, 1622, 2821, 2636, 2750, 2850, 3050, 2925, 3336, 3540, 2689, 3139, 2526, 3361, 3022, 3427, 3107, 3140, 3371, 3276, 2831, 3501, 2924, 3366, 3199, 3101, 3321, 3499, 2917, 2683, 2800, 2812, 3340, 3227, 3148, 3657, 4446, 1464, 1886, 2666, 3246, 3130, 3560, 3236, 2730, 3572, 3689, 2968, 1457, 3450, 2577, 2567, 2532, 3415, 2934, 2984, 2568, 4147, 3002, 2986, 910, 2979, 2542, 1762, 4472, 1529, 4057, 1976, 4507, 1583, 1711, 2013, 1594, 4440, 344, 920, 921, 4498, 3728, 3637, 3570, 3429, 4091, 2870, 2995, 4338, 3205, 2880, 3261, 3968, 4291, 4204, 4071, 4034, 1742, 2820, 3912, 3287, 1218, 1190, 4145, 354, 1782, 927, 3610, 356, 4224, 1918, 1959, 1840, 3736, 1770, 929, 930, 931, 4155, 360, 361, 362, 364, 1279, 365, 1543, 366, 367, 4049, 1633, 1722, 369, 1495, 1566, 373, 1211, 1726, 1442, 1748, 4142, 1434, 1358, 1191, 3732, 4110, 4039, 4506, 4156, 4036, 4030, 4016, 3899, 1247, 1855, 3919, 1244, 4140, 3930, 4117, 4189, 4001, 3643, 3619, 1240, 1575, 3871, 4135, 4408, 3604, 1274, 4149, 3741, 1938, 3709, 3622, 3834, 1983, 1743, 3979, 4461, 4113, 3817, 4232, 4214, 3902, 1219, 1486, 1512, 1516, 4047, 4082, 4094, 1574, 1248, 4078, 1872, 1426, 3687, 4318, 4243, 3866, 3704, 4172, 1856, 3324, 2769, 2678, 1561, 3296, 377, 1395, 1584, 4093, 4453, 4210, 4009, 4264, 4339, 1738, 4474, 4013, 4266, 1771, 1759, 1922, 3860, 3832, 1349, 1381, 3663, 1185, 3932, 3858, 1198, 4192, 3611, 1919, 3790, 3712, 4095, 1887, 4468, 1720, 4247, 934, 1790, 2002, 1657, 1336, 3894, 3576, 4314, 3695, 1850, 4362, 1815, 3638, 4454, 1661, 4504, 1359, 3650, 1305, 1648, 3831, 4435, 4451, 1993, 3849, 1718, 4068, 1835, 1425, 1428, 4380, 1658, 1452, 4024, 4072, 3791, 4491, 4323, 4014, 1304, 1511, 1981, 1676, 4422, 1283, 3861, 3644, 4259, 1418, 1176, 4216, 1421, 3992, 4423, 4253, 3748, 4119, 1297, 1954, 4450, 3711, 4344, 1578, 4384, 3892, 3674, 3595, 4405, 3973, 4109, 4159, 3744, 4387, 4275, 4492, 4365, 4118, 4278, 3751, 3678, 4353, 3175, 2970, 1228, 3534, 3437, 3406, 3641, 4470, 3941, 4348, 3587, 3818, 4350, 3821, 3929, 3824, 4465, 1398, 3828, 1284, 3773, 4209, 3014, 3884, 2783, 4038, 3545, 2916, 3112, 2834, 3880, 4399, 4048, 3752, 4207, 1235, 3943, 4355, 4087, 4100, 4163, 4486, 4178, 1643, 4152, 4445, 4303, 4284, 1213, 4382, 1399, 3714, 4487, 3615, 4018, 4420, 4121, 3724, 4282, 4310, 4488, 4127, 3670, 4052, 3627, 3777, 1371, 3685, 4258, 3812, 1581, 4124, 4508, 4500, 3652, 3972, 1528, 3717, 2740, 3125, 3546, 3842, 4404, 3690, 3962, 4136, 3589, 3907, 4153, 2707, 4180, 3923, 4444, 4361, 4394, 3758, 4510, 3742, 1710, 1407, 4187, 1193, 1188, 1196, 1724, 1717, 1200, 1997, 1701, 4280, 4006, 1984, 3833, 2561, 4442, 3900, 4298, 1761, 4388, 1597, 4317, 4249, 1341, 1203, 1680, 4441, 3628, 3725, 1945, 937, 4206, 1588, 1439, 3794, 4447, 3776, 3658, 4064, 4011, 4272, 4503, 1324, 3594, 3680, 1300, 1750, 3913, 3774, 1877, 1987, 3998, 3686, 3696, 4463, 3853, 4244, 4083, 1909, 3897, 1546, 3613, 3273, 3452, 3525, 1229, 3835, 1234, 3970, 3856, 3586, 1175, 4321, 2778, 4412, 4407, 3823, 1427, 1507, 1878, 4333, 3146, 4281, 4211, 3843, 1677, 1524, 1525, 1974, 1239, 4167, 3740, 1342, 1471, 4176, 1232, 1989, 4125, 1741, 1580, 4060, 1576, 1212, 3921, 1174, 4061, 4021, 3693, 3734, 1382, 3684, 3806, 3635, 3976, 3840, 4286, 3836, 4161, 3659, 3605, 4392, 4328, 1316, 4173, 4265, 1246, 1629, 1829, 3826, 1992, 1656, 1914, 1839, 3984, 3910, 4160, 4184, 4132, 4250, 1792, 3769, 1534, 4003, 1689, 1599, 1265, 1410, 1823, 1498, 1329, 386, 940, 1655, 3874, 4261, 3626, 3579, 1644, 3936, 4054, 4260, 4297, 4357, 4022, 4046, 1222, 1996, 3788, 3953, 4226, 4277, 4101, 3797, 4019, 3771, 3632, 1402, 4137, 3772, 3661, 4186, 4174, 1170, 3850, 1315, 1611, 1859, 4183, 1403, 4033, 3623, 3596, 1461, 1848, 1173, 1928, 1765, 3719, 3584, 4165, 4191, 3980, 4058, 4200, 4336, 3958, 1260, 4051, 3798, 4032, 1774, 4322, 3991, 4106, 3978, 3965, 4464, 3813, 4154, 1365, 3846, 4345, 4379, 3603, 3937, 3801, 1787, 1214, 4483, 4201, 1845, 1220, 4245, 1347, 3867, 1900, 3640, 3916, 4089, 3745, 3975, 4256, 4308, 4000, 3868, 4403, 3883, 4326, 4393, 3895, 4237, 3955, 4005, 4092, 4372, 4283, 3805, 4151, 3982, 3597, 3872, 3987, 4490, 3876, 3668, 4300, 1679, 1242, 3598, 3583, 3647, 4304, 3779, 1907, 4042, 3648, 3996, 3800, 4367, 4099, 1807, 3887, 4428, 1625, 1390, 1884, 1682, 4364, 4306, 3869, 1278, 942, 1505, 1709, 3600, 3914, 3948, 1865, 1716, 3961, 1506, 4221, 1376, 1683, 4276, 1721, 1632, 3607, 1455, 1913, 1497, 1317, 1951, 1778, 3768, 4225, 1668, 390, 4406, 4341, 1480, 1714, 1422, 397, 3618, 4433, 1177, 3898, 398, 950, 400, 1965, 4471, 953, 401, 403, 955, 1482, 3602, 4434, 3721, 1592, 1825, 1698, 1519, 1352, 4409, 1977, 405, 1631, 1684, 409, 3889, 2117, 411, 413, 414, 415, 961, 1905, 416, 963, 3675, 1833, 3974, 965, 970, 1897, 1272, 4133, 3830, 972, 424, 427, 1708, 4141, 3749, 1619, 975, 4044, 3590, 1944, 4126, 1923, 1706, 432, 976, 978, 4400, 1606, 980, 2604, 2895, 436, 3448, 2188, 438, 1692, 442, 3862, 4055, 4358, 2276, 985, 1664, 443, 4309, 4045, 3854, 3682, 1972, 2688, 4366, 3425, 3231, 3649, 2759, 2724, 3755, 1216, 3599, 3775, 2754, 2606, 3471, 3234, 2565, 2803, 2562, 2684, 3411, 3405, 2690, 1255, 3694, 3985, 3535, 1306, 4084, 3282, 1780, 448, 990, 991, 1485, 992, 1728, 993, 994, 1696, 997, 3116, 1869, 456, 1386, 1000, 3879, 2698, 460, 1001, 461, 1447, 1002, 1003, 463, 464, 4425, 465, 1004, 466, 469, 1231, 1468, 470, 1005, 476, 1273, 1744, 1488, 1659, 1604, 479, 1013, 1014, 481, 4313, 1499, 1016, 4073, 1777, 485, 4274, 487, 1775, 4205, 1526, 1697, 2000, 488, 1894, 1882, 1817, 1880, 490, 1018, 3917, 3616, 4311, 4473, 4085, 4401, 3783, 3765, 1538, 3870, 491, 3699, 3792, 4290, 494, 2421, 4090, 2012, 1803, 3642, 1322, 1020, 502, 1333, 504, 1890, 507, 3608, 1732, 1864, 1816, 1531, 513, 3636, 514, 1699, 1027, 1366, 4950, 4027, 3478, 2959, 1293, 3197, 1595, 3413, 518, 1032, 1033, 1675, 1797, 2315, 521, 1999, 3759, 1215, 4122, 1730, 3966, 1035, 4973, 528, 3911, 3289, 1821, 530, 532, 1874, 533, 1038, 538, 539, 3767, 1929, 3683, 1338, 1616, 1901, 1796, 1517, 4331, 4332, 4466, 2719, 4123, 4233, 1824, 3129, 3087, 3505, 4158, 4254, 3720, 4351, 4414, 3453, 3254, 1649, 544, 4240, 3580, 1046, 548, 549, 2598, 552, 553, 3819, 1259, 4062, 554, 2841, 3515, 1433, 1323, 4301, 555, 558, 3738, 1567, 559, 1054, 1270, 3857, 2175, 1257, 1238, 3662, 561, 1058, 563, 1061, 4203, 1899, 3981, 1062, 1303, 4116, 1946, 3620, 1514, 4002, 3679, 3964, 3707, 3666, 1348, 4273, 1804, 4497, 1401, 4438, 1895, 1264, 1912, 573, 3939, 4170, 4056, 1271, 1521, 1221, 1451, 3934, 4080, 4352, 1700, 3739, 1419, 1811, 3950, 1690, 3716, 1569, 1437, 1674, 4337, 1285, 4268, 1183, 3881, 3938, 4198, 4416, 4229, 4292, 4193, 4325, 4375, 4432, 4215, 3944, 4195, 4223, 1540, 4455, 4512, 1723, 3750, 4070, 4104, 4235, 1863, 4346, 1881, 1814, 4443, 3761, 1587, 3592, 576, 4469, 1275, 1950, 4129, 1296, 1551, 3733, 4111, 3993, 4108, 1287, 1713, 1556, 1736, 1995, 1705, 1861, 4120, 4417, 1785, 1236, 4293, 1827, 3839, 3983, 4395, 1957, 3928, 4295, 3715, 3855, 3609, 4076, 4175, 3927, 1757, 4299, 1773, 1364, 1462, 4007, 3729, 3665, 3722, 1691, 1712, 1624, 1751, 1394, 3924, 3952, 581, 2003, 1559, 1250, 1555, 4114, 1818, 1076, 4448, 1078, 1786, 3354, 1832, 3432, 2891, 1903, 4459, 589, 1563, 1084, 591, 592, 594, 595, 1858, 596, 1453, 2559, 2590, 2738, 4478, 4069, 1809, 1327, 4150, 3260, 3481, 3672, 3625, 4439, 3852, 3997, 3847, 4050, 3377, 4424, 4143, 4493, 3492, 1412, 4017, 4477, 1794, 602, 4263, 3072, 2009, 1754, 3888, 603, 604, 1368, 3827, 4103, 1571, 1438, 611, 1093, 612, 1094, 3701, 4389, 614, 615, 1332, 1715, 4369, 1652, 1541, 1921, 1733, 1373, 1870, 619, 4218, 1798, 1702, 1384, 3700, 1788, 1600, 624, 2473, 1423, 2771, 1339, 3875, 3070, 2015, 2557, 2795, 2906, 2103, 3299, 3118, 4576, 1103, 1614, 1947, 631, 4479, 3766, 1107, 635, 1813, 636, 2431, 637, 1109, 639, 3706, 1110, 640, 642, 3735, 3390, 1694, 3431, 2838, 3483, 3464, 3848, 2558, 3314, 3086, 3029, 2956, 3517, 2651, 2914, 2680, 2632, 3121, 3100, 3528, 3526, 3084, 4220, 3304, 2846, 1186, 3235, 2903, 3559, 2687, 3409, 3237, 2900, 2999, 3349, 3171, 2752, 3262, 3504, 3047, 3193, 3430, 2525, 2670, 2911, 3508, 2776, 2697, 3200, 2790, 3323, 2543, 2874, 2614, 3904, 3373, 3054, 2617, 4242, 3621, 2708, 4179, 4398, 3959, 1269, 3095, 1286, 3624, 4481, 3511, 2735, 4381, 3295, 1568, 1766, 3221, 2643, 2739, 3920, 647, 1801, 4279, 3762, 1637, 1509, 648, 1117, 1119, 2965, 2695, 3293, 4722, 1121, 653, 1122, 3264, 655, 656, 657, 4035, 2910, 3391, 2808, 3099, 2913, 3676, 2852, 3284, 2731, 3537, 3994, 1319, 4467, 1623, 660, 1123, 664, 1126, 1128, 1129, 1130, 670, 1527, 671, 1772, 1137, 5005, 1933, 1731, 1793, 3342, 1140, 1141, 687, 3822, 1601, 1148, 693, 3905, 694, 1414, 1149, 697, 1795, 1372, 1695, 1866, 1151, 4115, 1719, 1920, 4999, 1544, 703, 4031, 4305, 1636, 3810, 4452, 3677, 4227, 4402, 4157, 4197, 1337, 1253, 4028, 3989, 704, 1493, 1902, 1152, 4182, 707, 708, 709, 4476, 1375, 713, 714, 1841, 4234, 1154, 1314, 4096, 718, 719, 720, 2063, 1311, 721, 4217, 1627, 1158, 1953, 1201, 3787, 729, 3747, 730, 1846, 3815, 1964, 1822, 1262, 4480, 1537, 1291, 1318, 4294, 1582, 3439, 2833, 4287, 4509, 4505, 4267, 3697, 3272, 4112, 2967, 3651, 1805, 3705, 1195, 3859, 1164, 1165, 2351, 2423, 1745, 1973, 3807, 4307, 1169, 1454, or 1781.

18. The VP capsid polypeptide of claim 1, wherein X⁷ of SEQ ID NO: 5014 is R.

19. The VP capsid polypeptide of claim 18, wherein the 581 to 589 region of the VP capsid polypeptide has a sequence of any one of SEQ ID NOs: 740, 15, 742, 743, 17, 22, 24, 1836, 32, 36, 2450, 39, 752, 753, 1998, 3059, 2519, 757, 48, 1952, 50, 52, 760, 2389, 54, 2346, 58, 4086, 1660, 1966, 768, 2402, 772, 71, 72, 2453, 3882, 775, 1806, 3669, 1356, 2132, 81, 84, 85, 87, 4040, 88, 1885, 782, 783, 784, 785, 94, 788, 2173, 98, 2007, 102, 113, 799, 4848, 1444, 4821, 2329, 115, 119, 2290, 123, 806, 128, 134, 812, 145, 817, 154, 2149, 821, 167, 171, 4596, 183, 830, 191, 194, 2071, 195, 4920, 831, 2223, 207, 3901, 211, 212, 213, 215, 224, 4782, 845, 846, 849, 850, 854, 247, 248, 2245, 255, 261, 264, 265, 1477, 270, 874, 876, 279, 882, 1930, 285, 286, 886, 2119, 2468, 887, 888, 4138, 297, 3844, 302, 893, 307, 308, 2155, 1431, 2312, 900, 1635, 906, 2799, 2128, 2918, 1363, 4251, 2622, 3333, 3474, 3614, 2732, 3166, 3151, 3088, 2883, 3318, 2645, 2733, 3213, 3782, 1844, 2523, 2520, 2997, 2681, 3035, 3279, 2764, 3480, 2787, 1808, 3101, 3689, 4147, 1762, 1976, 340, 1594, 2439, 348, 4498, 1518, 1782, 926, 357, 359, 932, 363, 369, 1873, 3780, 4140, 4001, 3709, 3834, 1752, 4113, 3817, 4232, 1340, 1489, 4214, 3902, 3820, 4330, 1872, 3687, 4318, 375, 4210, 3860, 4212, 3695, 1851, 4504, 1910, 1428, 4323, 4422, 4259, 1176, 3711, 4365, 4383, 3969, 4128, 3802, 3863, 3821, 4171, 3824, 4462, 3760, 3753, 2783, 3880, 3943, 4163, 4178, 4199, 3724, 3670, 4482, 3692, 4430, 4316, 3645, 3690, 3589, 3730, 4426, 3851, 4429, 1335, 1717, 1997, 1975, 4280, 4006, 3900, 4298, 4388, 1341, 1350, 1909, 4412, 4407, 4281, 4167, 1893, 3585, 4015, 1747, 4286, 3826, 1473, 1914, 3984, 4495, 4184, 3977, 1707, 4074, 4003, 3915, 1410, 1498, 940, 4131, 4357, 1925, 1466, 1611, 1530, 4168, 4245, 4075, 3987, 1679, 4306, 3869, 3768, 393, 2265, 3618, 4433, 947, 399, 401, 402, 4139, 1352, 406, 415, 418, 420, 4919, 431, 4044, 976, 433, 434, 435, 442, 3873, 3411, 3985, 987, 1485, 2262, 457, 458, 4425, 466, 467, 468, 1468, 474, 1008, 1012, 1016, 4518, 1697, 490, 3616, 2247, 2302, 499, 500, 501, 509, 2110, 512, 1797, 520, 525, 3966, 1038, 537, 1041, 3683, 2165, 542, 4331, 3129, 1044, 4351, 3453, 1047, 1323, 4301, 557, 3738, 559, 1270, 3857, 1056, 2186, 1057, 1059, 565, 566, 3981, 567, 3620, 4002, 3666, 3939, 1221, 1397, 1437, 4337, 4268, 3938, 4292, 4215, 3750, 3633, 4070, 3592, 1827, 3839, 4395, 3855, 3665, 1624, 2395, 1818, 586, 587, 1903, 1080, 1081, 1082, 589, 1084, 1085, 594, 596, 4439, 3997, 1962, 1087, 4777, 606, 607, 610, 1094, 4389, 1603, 1095, 616, 618, 622, 1104, 4536, 3706, 2481, 3100, 3200, 3621, 4179, 1432, 4381, 643, 1115, 644, 2307, 2477, 652, 657, 658, 3994, 4467, 661, 663, 665, 4600, 1137, 1933, 4840, 1140, 678, 680, 683, 686, 692, 693, 696, 2081, 2280, 698, 1400, 4197, 1532, 1854, 706, 711, 712, 4570, 714, 1841, 1314, 4096, 2249, 726, 1846, 2385, 1318, 733, 3651, 1165, 4839, 4968, 4684, or 1454.

20. The VP capsid polypeptide of claim 1, wherein:
(a) X³ of SEQ ID NO: 5014 is a basic amino acid residue,
(b) X⁶ of SEQ ID NO: 5014 is a basic amino acid residue, or
(c) X³ of SEQ ID NO: 5014 is a basic amino acid residue and X⁶ of SEQ ID NO: 5014 is a basic amino acid residue.

21. The VP capsid polypeptide of claim 20, wherein the 581 to 589 region of the VP capsid polypeptide has a sequence of any one of SEQ ID NOs: 739, 4177, 1289, 740, 741, 18, 745, 3477, 1548, 3051, 2982, 2877, 3036, 3426, 3073, 3169, 747, 3362, 2784, 21, 3192, 23, 1638, 748, 1703, 1836, 3660, 29, 750, 1640, 33, 34, 35, 36, 37, 38, 1205, 3795, 753, 4288, 4219, 2770, 2962, 4241, 4107, 2718, 3317, 4391, 4053, 3263, 2553, 3947, 2710, 2608, 3467, 2796, 2961, 2529, 3320, 2674, 2635, 3446, 3053, 3250, 3688, 1182, 1998, 4320, 3351, 2655, 3514, 2779, 3194, 3319, 3224, 3281, 3708, 2807, 3562, 3274, 3374, 3013, 3416, 2981, 3065, 2777, 3469, 2977, 2638, 2972, 3059, 2574, 3380, 4262, 3167, 3368, 2781, 3547, 3386, 1225, 2960, 3485, 3370, 3443, 2824, 3327, 3178, 3006, 3252, 2991, 3470, 2888, 2572, 3418, 2642, 2519, 3363, 40, 2633, 41, 42, 43, 755, 45, 756, 46, 48, 1952, 758, 49, 3122, 2551, 3718, 3484, 3577, 759, 1230, 3960, 1378, 2994, 3080, 2589, 3681, 52, 760, 53, 762, 4659, 54, 3925, 55, 3654, 56, 60, 61, 4086, 1740, 1660, 765, 766, 62, 1966, 63, 64, 768, 771, 65, 66, 67, 68, 3816, 2599, 2706, 2399, 74, 3865, 1549, 1361, 2453, 3882, 3713, 1942, 75, 1312, 4501, 76, 77, 78, 1560, 4289, 3757, 79, 3593, 4043, 1806, 3908, 4397, 1615, 4415, 3723, 2006, 3754, 1470, 4360, 3945, 2854, 3523, 3669, 82, 4065, 83, 1294, 1484, 3891, 4456, 4040, 4496, 1982, 2001, 1478, 1189, 88, 1490, 1885, 1926, 89, 90, 91, 779, 1180, 92, 785, 786, 94, 95, 1831, 1867, 4458, 97, 1970, 1936, 1590, 99, 100, 789, 790, 1298, 101, 1688, 791, 792, 2007, 103, 794, 795, 104, 105, 106, 1849, 108, 4736, 1579, 110, 1906, 113, 1444, 1344, 116, 802, 117, 118, 2158, 121, 803, 804, 1463, 805, 122, 2058, 124, 125, 127, 4994, 807, 132, 809, 810, 133, 1978, 812, 135, 136, 137, 138, 813, 4673, 140, 815, 1326, 141, 142, 143, 144, 145, 4816, 1634, 1302, 817, 146, 818, 147, 148, 149, 151, 152, 153, 154, 155, 819, 820, 157, 821, 159, 160, 163, 164, 165, 166, 822, 167, 168, 169, 170, 171, 823, 824, 1651, 173, 1483, 174, 175, 825, 176, 177, 180, 826, 827, 181, 828, 182, 183, 4641, 829, 184, 185, 186, 187, 188, 189, 830, 191, 192, 193, 194, 195, 196, 1391, 197, 2223, 200, 201, 202, 203, 204, 205, 832, 833, 206, 834, 835, 836, 1334, 837, 3901, 3312, 2649, 1301, 211, 212, 1450, 4386, 3028, 213, 1446, 214, 215, 1896, 1522, 3490, 838, 2241, 217, 218, 219, 1612, 220, 221, 222, 839, 223, 840, 224, 226, 227, 230, 231, 842, 232, 233, 235, 844, 236, 237, 2150, 851, 852, 853, 1536, 240, 854, 242, 243, 244, 245, 246, 247, 855, 4634, 249, 250, 251, 252, 253, 254, 255, 857, 256, 257, 258, 259, 858, 859, 260, 261, 860, 861, 862, 262, 2326, 264, 1241, 265, 266, 866, 1477, 267, 867, 869, 870, 271, 871, 872, 272, 874, 1252, 273, 1591, 275, 1980, 276, 876, 877, 277, 278, 279, 1892, 879, 1539, 880, 1295, 3601, 3877, 1930, 1420, 1678, 1460, 2306, 282, 1799, 283, 1626, 1374, 287, 1620, 1290, 1354, 888, 291, 1956, 889, 292, 4324, 293, 4138, 891, 2224, 3903, 297, 3829, 3809, 4271, 3844, 1436, 1515, 1617, 1961, 304, 306, 1589, 4370, 308, 309, 894, 3646, 4059, 1431, 1331, 4948, 312, 895, 1779, 313, 314, 315, 316, 896, 1558, 1552, 897, 898, 321, 322, 899, 1958, 2134, 324, 901, 325, 902, 326, 1491, 329, 330, 905, 4484, 1756, 3536, 2701, 2799, 3332, 3294, 3159, 3069, 2637, 3025, 2782, 3247, 3350, 2692, 2586, 3004, 3049, 2694, 2650, 3554, 2983, 3403, 3214, 3163, 2541, 3090, 3097, 3462, 1430, 2941, 3486, 2842, 3558, 3104, 3037, 3419, 2780, 2931, 1276, 2928, 2609, 3068, 3128, 2548, 2538, 2618, 2789, 3228, 2657, 3189, 2863, 3307, 3300, 2546, 3048, 3543, 2946, 2975, 3346, 3067, 2728, 2955, 3408, 3027, 3094, 3203, 2988, 2751, 2953, 2566, 2578, 2823, 3063, 3335, 3000, 3181, 3011, 3138, 3389, 2805, 3074, 2894, 3149, 2560, 3417, 3265, 3378, 2901, 2837, 2822, 2745, 3473, 3530, 3040, 2597, 3509, 3522, 3161, 2926, 3209, 3105, 3400, 2630, 2905, 2671, 2818, 2806, 2702, 2709, 3549, 3538, 2534, 2773, 2623, 3491, 3243, 3136, 2693, 3164, 3343, 2918, 2555, 2794, 2679, 3510, 3110, 2672, 3442, 2929, 3184, 3488, 3093, 2996, 3141, 3544, 3102, 2856, 2957, 3466, 3461, 2788, 2660, 3344, 3204, 2720, 3379, 2826, 1789, 2785, 3249, 3527, 4460, 3352, 2569, 4457, 2011, 4319, 3906, 1533, 1755, 1888, 4248, 1557, 1363, 1934, 1602, 1404, 4188, 1330, 4349, 3337, 3533, 2629, 3038, 2539, 3567, 3291, 3348, 3115, 3359, 2993, 3079, 3506, 2527, 2963, 2938, 2516, 3113, 1345, 2639, 3143, 3044, 2747, 3154, 3280, 3039, 2743, 2902, 3056, 2554, 2522, 3103, 3210, 3434, 2656, 4251, 4166, 4196, 3206, 3328, 2588, 3553, 2714, 3078, 3222, 3137, 3357, 2717, 2944, 3012, 3220, 3202, 2811, 3083, 3269, 3566, 2699, 2515, 3023, 2533, 3288, 3075, 3005, 2685, 3058, 2976, 2622, 3333, 3463, 2939, 3521, 3268, 3117, 2626, 2616, 3240, 2570, 3565, 2919, 3157, 2849, 3444, 2631, 3420, 2659, 3325, 3186, 2920, 3258, 3440, 3457, 3310, 2761, 3134, 2621, 3531, 2711, 2774, 2867, 2585, 3155, 2620, 3156, 2844, 3126, 3160, 2909, 3542, 3225, 2887, 3474, 3218, 2744, 2896, 3135, 3424, 3498, 3529, 2661, 2667, 2549, 2819, 2768, 2935, 3182, 2772, 3230, 3043, 2922, 3581, 3524, 2869, 2610, 3298, 2775, 3108, 2603, 3614, 2612, 2860, 3187, 3238, 3786, 4385, 3016, 3436, 2876, 2987, 3532, 3438, 3561, 3259, 2663, 2890, 3433, 3071, 3018, 2580, 2755, 3015, 2540, 3398, 2664, 2583, 2830, 2644, 2641, 3513, 2725, 2723, 3338, 3556, 2866, 2514, 2932, 2753, 2862, 2899, 2605, 2989, 3096, 3124, 2985, 2716, 3145, 3017, 2591, 2640, 3033, 1853, 3216, 3316, 3412, 2971, 3256, 3153, 3575, 3339, 2915, 2531, 3552, 3475, 3060, 3375, 2756, 3382, 2847, 2859, 3251, 3702, 3423, 2537, 2801, 3076, 2696, 3092, 3459, 3144, 3441, 2802, 3479, 2907, 3512, 3518, 3021, 2871, 3032, 2647, 2945, 3045, 2763, 3313, 3034, 3315, 3541, 2746, 2669, 2524, 3003, 2732, 3166, 3046, 3306, 2873, 3364, 3253, 3215, 3061, 2804, 2722, 2964, 2990, 2836, 4098, 4449, 3173, 2762, 3737, 2628, 3507, 2564, 3031, 2872, 3360, 2658, 2930, 2904, 3244, 3217, 3311, 3445, 2840, 3372, 2958, 3098, 3356, 3456, 3388, 2624, 3207, 2576, 2742, 2665, 2815, 3052, 3421, 2593, 3242, 2535, 2966, 2898, 2858, 2943, 2668, 2798, 3196, 2528, 2713, 3001, 2691, 2948, 2767, 2544, 3302, 2734, 2893, 2592, 2861, 3502, 2969, 2582, 3229, 2676, 2545, 3255, 3330, 2547, 3257, 2882, 3151, 3088, 2883, 3318, 2645, 2733, 2587, 3500, 3008, 2715, 2845, 3183, 2654, 3233, 3267, 2741, 2827, 2704, 3091, 2832, 2736, 3177, 3271, 2835, 2908, 3176, 2947, 3292, 3191, 2517, 3026, 3082, 3392, 3381, 2584, 2712, 3213, 3451, 2634, 3150, 2810, 3303, 2573, 3460, 2615, 3394, 2828, 3329, 4377, 4499, 3555, 2974, 3782, 3629, 3578, 3885, 2817, 3248, 2954, 3334, 3571, 3345, 3551, 3384, 3422, 1357, 1844, 2530, 2973, 4418, 4081, 3951, 1764, 1671, 1843, 3449, 3185, 3399, 2786, 3055, 3472, 3397, 2601, 3564, 3277, 4373, 3548, 3179, 3407, 3841, 3347, 3142, 4255, 4431, 3241, 3077, 2700, 3147, 2648, 3283, 2829, 3278, 2581, 2536, 4363, 2848, 3410, 2797, 2523, 2520, 2721, 3496, 2571, 3198, 3219, 3030, 2673, 2921, 3837, 3301, 3322, 2705, 3239, 2949, 3369, 3396, 2892, 2897, 2766, 3174, 3297, 2550, 2889, 2933, 2793, 2627, 2677, 3119, 2596, 3226, 3172, 3089, 2868, 2839, 3942, 3120, 3286, 2843, 3465, 1564, 3946, 4222, 1504, 3999, 2682, 1875, 2865, 3539, 3168, 2864, 3308, 3557, 2940, 3109, 3503, 2625, 3455, 3114, 2595, 3331, 2978, 2518, 2521, 4079, 3024, 3573, 2952, 2653, 1769, 3180, 2813, 2652, 2600, 2816, 3201, 3188, 3270, 2997, 2992, 3009, 3520, 2936, 3275, 3165, 3447, 3131, 3305, 2809, 2792, 2729, 2814, 2619, 3266, 2825, 3066, 2857, 2998, 3064, 2681, 3035, 3279, 2764, 3480, 3127, 2912, 3010, 2607, 3211, 3111, 3041, 1573, 3909, 4269, 3487, 3489, 3019, 335, 1266, 3435, 3482, 3020, 2748, 2646, 2787, 2760, 2563, 3085, 3133, 3158, 3170, 2703, 3494, 2552, 3395, 3245, 3404, 2675, 2791, 1911, 908, 1935, 2749, 3341, 3355, 2575, 2942, 2886, 2758, 2594, 3495, 2884, 3516, 3042, 2737, 2923, 3563, 2855, 3476, 2611, 2937, 3383, 3497, 3402, 3162, 2662, 2875, 3223, 2878, 1808, 3285, 2757, 3057, 2951, 3519, 2579, 2853, 3387, 3401, 3493, 3393, 1608, 3365, 2885, 3574, 3081, 3007, 3568, 3152, 3367, 3358, 336, 3468, 3290, 3550, 3132, 2726, 2879, 3190, 3309, 2613, 2765, 3106, 1355, 3454, 2851, 2881, 3232, 3458, 3326, 3353, 2927, 3212, 2950, 3376, 3208, 3062, 3612, 3195, 3385, 2686, 2602, 3569, 3123, 2727, 1622, 2821, 2636, 2750, 2850, 3050, 2925, 3336, 3540, 2689, 3139, 2526, 3361, 3022, 3427, 3107, 3140, 3371, 3276, 2831, 3501, 2924, 3366, 3199, 3101, 3321, 3499, 2917, 2683, 2800, 2812, 3340, 3227, 3148, 3657, 4446, 1746, 1464, 1886, 2666, 3246, 3130, 3560, 3236, 2730, 3572, 1607, 3689, 2968, 1457, 1500, 909, 337, 1184, 3450, 2577, 2567, 2532, 3415, 2934, 2984, 2568, 4147, 3002, 2986, 2979, 2542, 2492, 1762, 4472, 1472, 1529, 4057, 1976, 4507, 1583, 338, 911, 1711, 340, 912, 2013, 341, 1594, 4440, 917, 344, 918, 919, 921, 922, 347, 349, 351, 923, 924, 4498, 1518, 3728, 3637, 3570, 3429, 4091, 2870, 2995, 4338, 3205, 2880, 3261, 1994, 3968, 4291, 4204, 4071, 4034, 1742, 2820, 3912, 3287, 4145, 354, 925, 1782, 926, 927, 3610, 357, 358, 359, 4224, 1918, 1959, 3736, 1770, 931, 4155, 364, 1279, 365, 1543, 2472, 367, 4049, 1633, 1722, 368, 369, 1495, 1566, 370, 1211, 1873, 933, 1748, 4142, 1434, 1358, 1191, 3732, 4110, 4039, 4411, 4506, 4270, 4156, 3780, 4036, 4030, 4016, 1550, 3899, 1247, 1855, 1181, 3919, 1639, 3664, 1244, 4140, 3930, 4117, 4189, 4001, 3799, 3643, 3619, 1240, 1686, 1479, 1307, 1575, 4296, 1665, 3871, 4135, 1605, 4408, 3604, 1274, 3741, 1938, 3709, 1727, 3893, 1280, 3622, 1784, 3834, 1752, 1983, 1743, 3979, 4461, 4113, 3817, 4232, 1340, 1489, 4214, 1219, 1486, 1512, 1481, 1516, 3820, 3789, 4252, 4047, 4330, 4082, 4094, 1574, 1248, 4078, 1872, 1426, 3785, 3687, 4318, 4243, 3866, 3704, 4172, 1621, 4315, 1192, 1513, 1856, 3324, 2769, 2678, 1561, 3296, 377, 1395, 4093, 4453, 3940, 3778, 4374, 4210, 4009, 4264, 4339, 4368, 1738, 378, 1610, 4194, 4474, 4013, 4266, 1771, 3860, 3832, 1349, 1381, 3663, 1642, 1185, 4356, 3932, 1233, 4212, 3858, 1198, 4192, 3611, 1919, 1819, 3790, 3712, 1969, 4095, 1887, 4468, 1720, 4247, 2002, 1657, 1663, 1336, 3894, 1554, 1494, 1405, 3576, 4314, 3695, 1851, 4362, 1815, 3845, 4511, 3656, 3638, 1406, 1596, 4454, 1443, 1661, 1359, 1734, 3650, 1910, 1648, 3831, 4435, 1208, 1988, 4451, 1993, 1986, 3849, 1718, 4068, 1835, 1425, 1428, 1282, 4380, 1658, 1452, 1687, 4024, 379, 4072, 3791, 4491, 4323, 4014, 1304, 1440, 1511, 1981, 1676, 1547, 4422, 1618, 1871, 1256, 3748, 4119, 1297, 1586, 1251, 1299, 4450, 3990, 4029, 4097, 3890, 3796, 1389, 3711, 4344, 1578, 1476, 4343, 1202, 4413, 4384, 3808, 1647, 1475, 3892, 3674, 1739, 3926, 3595, 1943, 3756, 4405, 3973, 4109, 4159, 3744, 4387, 1960, 4275, 3781, 1535, 1210, 4492, 4365, 4118, 3655, 3886, 4278, 4383, 4485, 1392, 3751, 3931, 3986, 3678, 1249, 4353, 4208, 3710, 4238, 4213, 3969, 4436, 3175, 4128, 2970, 1228, 3534, 3437, 3406, 3641, 3639, 3954, 4335, 3995, 3582, 4475, 3784, 4470, 4010, 3802, 3941, 4427, 4396, 4348, 3587, 3818, 3864, 3956, 3863, 3731, 3814, 4067, 4354, 4350, 4334, 3821, 1932, 3929, 4171, 1258, 3824, 3631, 4465, 4494, 1320, 1398, 3828, 1204, 1223, 1284, 1685, 3773, 4209, 3014, 4462, 4246, 4190, 4312, 4023, 3760, 3753, 1178, 3884, 2783, 4038, 3545, 2916, 3112, 2834, 3880, 3673, 4102, 4399, 4048, 3752, 4207, 1235, 3943, 4355, 4087, 4100, 4327, 4037, 4163, 3918, 4486, 1243, 3933, 4178, 1662, 1643, 4152, 3634, 3617, 4445, 4303, 1370, 3838, 4199, 4284, 1213, 4382, 1399, 1187, 3714, 1828, 4487, 3615, 1842, 1501, 3746, 4018, 4420, 3606, 4121, 3724, 3935, 1941, 4419, 4282, 1955, 1949, 4310, 4488, 1577, 4127, 1288, 1171, 3670, 4052, 1860, 4124, 4508, 4500, 3652, 3972, 1309, 1630, 1528, 3717, 1217, 3692, 4430, 3764, 4316, 4285, 3645, 3971, 4421, 1172, 4026, 2740, 3125, 3546, 1725, 1206, 3842, 4404, 3690, 3962, 4513, 4340, 4329, 4410, 3703, 4136, 1763, 1487, 3589, 3907, 4153, 2707, 3730, 4426, 4180, 4041, 3923, 4444, 3851, 4429, 4361, 1441, 4394, 4302, 3758, 4510, 3742, 1868, 4077, 1710, 1939, 1335, 1997, 1975, 1701, 4280, 1613, 4006, 1984, 1351, 3653, 3833, 1593, 2561, 4442, 3900, 4298, 1761, 4388, 1820, 1597, 4317, 4249, 1341, 1680, 4441, 3628, 3725, 1945, 937, 4206, 1588, 1439, 3794, 4447, 1838, 3776, 3658, 4064, 1377, 4011, 4272, 4503, 1367, 3594, 3680, 1300, 1750, 3913, 3774, 1877, 1987, 1862, 3998, 1380, 4185, 3686, 3696, 4463, 1350, 4008, 4230, 3853, 4244, 4083, 381, 1909, 3897, 1546, 3613, 3273, 3452, 3525, 1229, 4105, 3835, 383, 1234, 3970, 1492, 3856, 3586, 1175, 4321, 4020, 4144, 1224, 1199, 3667, 2778, 4412, 4407, 1812, 1810, 3823, 1416, 1427, 1507, 1878, 4333, 3146, 4281, 4211, 1179, 3843, 1669, 1677, 1524, 1525, 1974, 384, 1979, 1456, 1239, 4167, 3740, 1876, 1388, 1967, 1474, 385, 1342, 4125, 1508, 1580, 4060, 4378, 1576, 1212, 1893, 3921, 3585, 1174, 1396, 4061, 4015, 1207, 3698, 3825, 3922, 4021, 4181, 1598, 1916, 1429, 4502, 4231, 1321, 4390, 3693, 3734, 1382, 3684, 1747, 3806, 3896, 3635, 1768, 4025, 3976, 3840, 3963, 4286, 1502, 3836, 4161, 3659, 3743, 4130, 3605, 1385, 1783, 4392, 4328, 1316, 4173, 4265, 1246, 1985, 1629, 1829, 1737, 1837, 1914, 1839, 1834, 3984, 4495, 3910, 4160, 3671, 4184, 4132, 4250, 1503, 1237, 1523, 1417, 4063, 1562, 3977, 1971, 1707, 1847, 1792, 3769, 4074, 1534, 4239, 4003, 3915, 1689, 1776, 1599, 1265, 1655, 3874, 4261, 3626, 1791, 3579, 1644, 3936, 4054, 4260, 4359, 4131, 4297, 4357, 4022, 3770, 4046, 1222, 1996, 3788, 4169, 1925, 3953, 4228, 4226, 4277, 4101, 1889, 1369, 3797, 4088, 4019, 3771, 3632, 1402, 1520, 1767, 1466, 1194, 4137, 1908, 1927, 1758, 3772, 3661, 4186, 4174, 1170, 3850, 1315, 1611, 1530, 941, 4033, 3623, 3596, 1461, 1848, 1173, 1928, 1459, 1765, 1826, 3719, 1931, 3584, 4004, 3591, 3967, 4168, 3957, 3878, 4165, 4191, 3980, 4058, 4200, 4336, 3958, 1260, 4051, 3798, 4032, 1774, 4322, 3991, 4106, 1641, 1570, 3978, 3965, 4464, 3813, 4154, 1365, 4257, 3846, 4345, 4379, 3603, 1693, 3937, 3801, 1787, 1214, 4483, 4201, 1898, 1220, 4245, 1347, 3867, 1900, 3640, 3916, 4089, 1209, 3745, 3988, 3975, 4236, 4075, 4146, 4256, 4308, 4000, 4148, 3588, 3868, 4403, 3883, 4326, 4393, 3895, 4237, 3955, 3727, 4005, 4092, 4372, 4283, 1553, 3805, 4151, 1281, 1681, 4489, 3982, 4437, 3597, 4342, 3872, 3987, 4490, 3876, 3668, 4300, 1679, 1242, 3598, 3583, 3647, 389, 4304, 3793, 3779, 1937, 1907, 4042, 3648, 3996, 3800, 4367, 4099, 1807, 3887, 4428, 1625, 1390, 1884, 1682, 4364, 4306, 3869, 1278, 1672, 942, 1505, 1542, 1709, 1915, 3600, 3914, 1968, 3948, 1670, 3811, 1865, 1362, 1716, 3961, 1506, 4221, 1376, 1683, 4276, 1445, 1721, 1632, 3607, 1328, 1455, 1913, 1497, 1317, 1951, 1778, 1379, 3768, 4225, 1668, 390, 391, 4406, 4341, 1480, 395, 1714, 1422, 396, 2265, 397, 3618, 4433, 1177, 3898, 398, 949, 950, 399, 951, 400, 1965, 2345, 4471, 952, 402, 2475, 403, 404, 4139, 1482, 3602, 4434, 3721, 1592, 1519, 1352, 4202, 4409, 1977, 1917, 407, 408, 1631, 1684, 409, 3889, 958, 959, 412, 960, 414, 415, 961, 1905, 416, 963, 417, 3675, 1833, 3974, 420, 421, 965, 966, 969, 970, 422, 1897, 4754, 423, 4133, 3830, 972, 424, 973, 427, 1708, 4141, 3749, 431, 1619, 975, 4044, 3590, 1944, 4126, 1923, 1706, 4400, 434, 1606, 979, 2604, 2895, 436, 3448, 1692, 983, 3862, 4055, 4358, 984, 985, 1664, 4045, 3854, 3682, 2491, 445, 1972, 2688, 4366, 3425, 3231, 3649, 2759, 2724, 3873, 3755, 1216, 3599, 3775, 2754, 2606, 3471, 3234, 2565, 2803, 2562, 2684, 3411, 3405, 2690, 1255, 3694, 3535, 1306, 4084, 3282, 1780, 987, 988, 450, 990, 451, 452, 991, 992, 1728, 994, 995, 454, 1696, 998, 3116, 1869, 456, 1386, 999, 3879, 2698, 1001, 461, 1447, 462, 464, 4425, 1645, 1231, 1468, 472, 473, 4725, 476, 1273, 1007, 1744, 1488, 1659, 477, 1604, 481, 4313, 482, 483, 1499, 484, 2513, 1016, 4073, 1777, 1458, 4274, 4539, 4528, 487, 1775, 4205, 1526, 1697, 1017, 2000, 489, 1882, 1817, 1880, 490, 1018, 3917, 3616, 4311, 1800, 4473, 4085, 4401, 1310, 3783, 3765, 491, 1948, 3699, 1735, 3792, 4290, 495, 4090, 2247, 496, 1019, 2012, 1803, 3642, 1322, 498, 1021, 501, 1022, 502, 1333, 503, 1023, 1890, 1025, 510, 1026, 3608, 1732, 511, 2397, 1864, 1816, 1531, 3636, 1699, 1027, 1029, 1366, 2112, 2124, 2376, 1261, 4027, 3478, 3763, 2959, 517, 3197, 1595, 3413, 1448, 518, 2057, 1675, 1797, 2148, 2420, 520, 2315, 523, 1999, 3759, 1215, 4122, 1730, 524, 526, 3966, 3911, 529, 3289, 1821, 530, 531, 1874, 1038, 536, 537, 3767, 1929, 1041, 1042, 3683, 542, 1338, 1517, 4331, 4332, 4466, 2719, 3803, 4123, 4233, 1824, 3129, 3087, 3505, 4158, 4254, 1449, 3720, 4351, 4414, 1673, 3453, 3254, 1649, 544, 545, 546, 4240, 3580, 1046, 1047, 550, 2598, 551, 552, 3819, 1259, 4062, 2841, 1050, 3515, 4301, 557, 1052, 1053, 3738, 1567, 1270, 3857, 1055, 2198, 1257, 1238, 3662, 561, 562, 1058, 566, 1060, 1061, 2231, 4203, 1899, 3981, 1062, 1303, 4116, 567, 1946, 3620, 1514, 4002, 3679, 3964, 3707, 3666, 1348, 4273, 1804, 4497, 1401, 4438, 1895, 1264, 572, 1912, 3939, 4170, 4056, 1271, 1065, 1521, 1221, 1451, 1654, 3934, 4080, 4352, 1700, 3739, 1565, 1419, 1811, 3950, 1690, 1397, 3716, 1437, 1674, 4337, 1285, 4268, 1183, 3726, 3881, 4134, 4347, 4012, 3938, 4066, 4198, 4416, 4164, 3630, 4229, 4292, 4193, 4325, 4375, 4371, 4432, 4215, 1753, 3944, 1409, 4195, 1729, 4223, 1540, 1723, 1070, 3750, 3633, 4070, 4104, 4162, 4235, 1863, 4346, 1881, 1814, 1572, 4443, 3761, 1346, 1587, 1072, 3592, 576, 1891, 4469, 1275, 1950, 1963, 4129, 1296, 1551, 3733, 4111, 3993, 4108, 3949, 1287, 1713, 1736, 1995, 1435, 1424, 1830, 1705, 1861, 1197, 1254, 4120, 1545, 4417, 1469, 1785, 1236, 4293, 3839, 3983, 4395, 1957, 3928, 4295, 3715, 3855, 3609, 1990, 4076, 4175, 3927, 1757, 1650, 4299, 1773, 2004, 1267, 1364, 579, 1462, 1879, 4007, 3729, 3665, 3722, 1691, 1624, 1751, 1394, 3924, 3952, 580, 581, 2003, 1343, 1559, 1250, 1555, 4114, 1818, 1075, 1076, 1077, 1704, 4448, 1078, 1079, 1786, 585, 3354, 1832, 3432, 2891, 2505, 1903, 1081, 1082, 4459, 1083, 1563, 590, 591, 1085, 594, 597, 598, 1453, 2559, 2590, 2738, 4478, 4069, 1809, 1327, 4150, 3260, 3481, 3672, 3625, 2008, 4439, 3852, 3997, 1411, 599, 3847, 1268, 4050, 3377, 4424, 1496, 4143, 4493, 3492, 1962, 600, 601, 4017, 4477, 1794, 4263, 3072, 2009, 1754, 1087, 1088, 3888, 2324, 605, 1368, 3827, 4103, 606, 4549, 1090, 1571, 1091, 1438, 1092, 1093, 612, 1094, 3701, 4389, 613, 1603, 616, 1332, 1715, 4369, 1652, 1096, 617, 1541, 618, 1921, 1733, 1373, 1870, 619, 4218, 1798, 1099, 1100, 1702, 2239, 1101, 1667, 1384, 623, 3700, 1788, 1600, 624, 626, 2771, 627, 1339, 3875, 628, 629, 3070, 4818, 4860, 2557, 2795, 2906, 3118, 4657, 4646, 4875, 4627, 4747, 1614, 1947, 4618, 4479, 3766, 632, 1104, 1105, 633, 635, 1813, 636, 2213, 3706, 1110, 640, 1111, 641, 642, 1694, 3431, 2838, 3483, 3464, 3848, 2558, 3314, 3086, 3029, 2956, 3517, 2651, 2914, 2680, 2632, 3121, 3100, 3528, 3526, 3084, 4220, 3304, 2846, 1186, 3235, 2903, 3559, 2687, 3409, 3237, 2900, 2999, 3349, 3171, 2752, 3262, 3504, 3047, 4376, 3193, 3430, 2525, 2670, 2911, 3508, 2776, 2697, 3200, 2790, 3323, 2543, 2874, 2614, 3904, 3373, 3054, 2617, 4242, 3621, 2708, 4179, 4398, 3959, 3095, 1286, 3624, 4481, 1432, 3511, 2735, 4381, 3295, 1585, 1114, 1766, 3221, 2643, 2739, 3920, 644, 1116, 645, 646, 2307, 647, 1801, 4279, 3762, 1637, 1509, 1119, 2965, 2369, 2695, 3293, 650, 651, 1120, 652, 1121, 4909, 1122, 3264, 655, 658, 659, 4035, 2910, 3391, 2808, 3099, 2913, 3676, 2852, 3284, 2731, 1609, 3994, 1319, 4467, 1802, 1227, 1623, 661, 2364, 662, 663, 664, 1124, 1125, 1127, 1128, 1129, 668, 669, 1130, 670, 1131, 1527, 1132, 671, 1772, 1135, 672, 5005, 2208, 4952, 4945, 1933, 1731, 1793, 675, 676, 3342, 1138, 1139, 677, 679, 1142, 1143, 681, 1145, 682, 685, 688, 3822, 689, 690, 691, 1147, 1601, 3905, 694, 695, 1414, 4793, 4575, 1150, 1795, 1372, 1695, 1866, 4115, 1719, 698, 2217, 1920, 699, 700, 1544, 702, 703, 4031, 4305, 1636, 1393, 2010, 3810, 4452, 3677, 4227, 1277, 1400, 4402, 4157, 4197, 1337, 1253, 1532, 4028, 3989, 1493, 1854, 1902, 1510, 2340, 4182, 706, 707, 708, 4476, 1245, 714, 1841, 4234, 1314, 4096, 717, 1155, 2249, 4217, 1156, 723, 1157, 1627, 725, 1159, 1953, 1160, 1201, 727, 3787, 4568, 3747, 730, 1846, 3815, 2005, 1964, 1822, 1262, 4480, 1537, 1291, 1318, 4294, 1582, 734, 3439, 2833, 4287, 4509, 4505, 4267, 3697, 3272, 4112, 2967, 3651, 1628, 3705, 1195, 3859, 1164, 2394, 1165, 1166, 1745, 1973, 1168, 3807, 4307, 2303, 1454, or 1781.

22. The VP capsid polypeptide of claim 20, wherein the 581 to 589 region of the VP capsid polypeptide has a sequence of any one of SEQ ID NOs: 4884, 738, 4177, 1289, 740, 14, 743, 744, 17, 3477, 1548, 3051, 2982, 2877, 746, 19, 3036, 3426, 3073, 3169, 747, 3362, 2784, 4889, 21, 3192, 4942, 22, 1638, 748, 24, 749, 27, 1703, 1836, 28, 3660, 29, 750, 1640, 33, 35, 36, 2450, 1653, 1205, 3795, 753, 4288, 4219, 2770, 2962, 4241, 4107, 2718, 3317, 4391, 3263, 2553, 3947, 2710, 2608, 3467, 2796, 2961, 2529, 3320, 2674, 2635, 3446, 3053, 3250, 3688, 1998, 4320, 3351, 2655, 3514, 2779, 3194, 3319, 3224, 3281, 3708, 2807, 3562, 3274, 3374, 3013, 3416, 2981, 3065, 2777, 3469, 2977, 2638, 2972, 3059, 2574, 3380, 4262, 3167, 3368, 2781, 3547, 3386, 1225, 2960, 3485, 3370, 3443, 2824, 1467, 3327, 3178, 3006, 3252, 2991, 3470, 2888, 2572, 3418, 2642, 2519, 3363, 40, 2633, 44, 45, 756, 47, 48, 1952, 3122, 2551, 3718, 3484, 3577, 759, 50, 1308, 3960, 1378, 2994, 3080, 2589, 3681, 51, 760, 2389, 762, 3925, 3654, 763, 4626, 59, 60, 4086, 1740, 1660, 62, 1966, 63, 2438, 768, 66, 67, 2197, 68, 3816, 2599, 2706, 72, 73, 74, 3865, 1549, 1361, 2453, 3882, 773, 3713, 1942, 1312, 4501, 76, 1413, 775, 1560, 4289, 3757, 3593, 3908, 4397, 4415, 3723, 3754, 4360, 3945, 2854, 3523, 3669, 1356, 2132, 4065, 1294, 1484, 85, 86, 3891, 4456, 4040, 4496, 1982, 2001, 1478, 1189, 1490, 1885, 1926, 89, 780, 1180, 92, 781, 782, 783, 2356, 786, 94, 95, 788, 1831, 1867, 96, 4458, 97, 1970, 4656, 1936, 1590, 98, 99, 789, 790, 1298, 101, 1688, 791, 792, 2007, 102, 103, 104, 105, 107, 108, 1579, 110, 1906, 111, 798, 112, 799, 800, 2461, 1444, 801, 114, 115, 1344, 116, 802, 117, 118, 119, 121, 803, 1463, 1760, 124, 806, 126, 128, 807, 129, 131, 808, 2281, 133, 1978, 811, 812, 135, 136, 137, 138, 814, 140, 1326, 141, 142, 143, 2344, 816, 1634, 1302, 817, 818, 147, 148, 149, 150, 151, 154, 155, 819, 820, 156, 157, 2295, 158, 161, 162, 165, 822, 168, 169, 170, 823, 172, 1651, 173, 1483, 174, 825, 176, 178, 180, 827, 181, 828, 4911, 184, 185, 186, 188, 189, 830, 192, 193, 194, 196, 1391, 197, 198, 199, 200, 201, 202, 203, 4775, 205, 832, 206, 834, 207, 208, 209, 210, 835, 836, 1334, 3901, 3312, 2649, 1450, 4386, 3028, 1446, 2206, 215, 1522, 3490, 217, 219, 1612, 220, 221, 222, 839, 223, 840, 224, 225, 4751, 228, 229, 230, 231, 2448, 842, 232, 233, 4782, 234, 235, 238, 847, 239, 850, 851, 853, 1536, 240, 241, 242, 243, 244, 245, 246, 247, 4923, 4696, 250, 251, 254, 255, 857, 256, 258, 259, 859, 260, 861, 862, 4966, 864, 263, 4970, 2318, 865, 2326, 264, 1241, 266, 1477, 867, 268, 868, 269, 270, 869, 870, 271, 871, 872, 272, 873, 4655, 4972, 1252, 1591, 875, 274, 275, 1980, 276, 876, 877, 2066, 277, 278, 280, 2323, 1892, 1539, 2214, 881, 882, 3601, 3877, 1930, 1460, 282, 1799, 284, 4553, 4772, 1626, 286, 1374, 1620, 1290, 1354, 887, 1956, 889, 4765, 292, 4324, 4138, 891, 296, 3903, 297, 3829, 3809, 4271, 3844, 1436, 300, 1617, 1961, 5010, 302, 304, 305, 2147, 1589, 4370, 307, 3646, 4059, 1431, 1331, 312, 1779, 313, 896, 1558, 1552, 318, 319, 322, 1958, 2454, 323, 324, 901, 1491, 328, 329, 330, 4820, 4484, 1756, 907, 4584, 3536, 2701, 2799, 3332, 3294, 3159, 3069, 2637, 3025, 2782, 3247, 3350, 2692, 2586, 3004, 3049, 2694, 2650, 3554, 2983, 3403, 3214, 3163, 2541, 3090, 3097, 3462, 1430, 2941, 3486, 2842, 3558, 3104, 3037, 3419, 2780, 2931, 1276, 2928, 2609, 3068, 3128, 2548, 2538, 2618, 2789, 3228, 2657, 3189, 2863, 3307, 3300, 2546, 3048, 3543, 2946, 2975, 3346, 3067, 2728, 2955, 3408, 3027, 3094, 3203, 2988, 2751, 2953, 2566, 2578, 2823, 3063, 3335, 3000, 3181, 3011, 3138, 3389, 2805, 3074, 2894, 3149, 2560, 3417, 3265, 3378, 2901, 2837, 2822, 2745, 3473, 3530, 3040, 2597, 3509, 3522, 3161, 2926, 3209, 3105, 3400, 2630, 2905, 2671, 2818, 2806, 2702, 2709, 3549, 3538, 2534, 2773, 2623, 3491, 3243, 3136, 2693, 3164, 3343, 2918, 2555, 2794, 2679, 3510, 3110, 2672, 3442, 2929, 3184, 3488, 3414, 3093, 2996, 3141, 3544, 3102, 2856, 2957, 3466, 3461, 2788, 2660, 3344, 3204, 2720, 3379, 2826, 1789, 2785, 3249, 3527, 4460, 3352, 2569, 4457, 2011, 4319, 3906, 1533, 1755, 4248, 1557, 3804, 1602, 4188, 1330, 4349, 3337, 3533, 2629, 3038, 2539, 3567, 3291, 3348, 3115, 3359, 2993, 3079, 3506, 2527, 2963, 2938, 2516, 3113, 2639, 3143, 3044, 2747, 3154, 3280, 3039, 2743, 2902, 3056, 2554, 2522, 3103, 3210, 3434, 2656, 4251, 4196, 3206, 3328, 2588, 3553, 2714, 3078, 3222, 3137, 3357, 2717, 2944, 3012, 3220, 3202, 2811, 3083, 3269, 3566, 2699, 2515, 3023, 2533, 3288, 3075, 3005, 2685, 3058, 2976, 2622, 3333, 3463, 2939, 3521, 3268, 3117, 2626, 2616, 3240, 2570, 3565, 2919, 3157, 2849, 3444, 2631, 3420, 2659, 3325, 3186, 2920, 3258, 3440, 3457, 3310, 2761, 3134, 2621, 3531, 2711, 2774, 2867, 2585, 3155, 2620, 3156, 2844, 3126, 3160, 2909, 3542, 3225, 2887, 3474, 3218, 2744, 2896, 3135, 3424, 3498, 3529, 2661, 2667, 2549, 2819, 2768, 2935, 3182, 2772, 3230, 3043, 2922, 3581, 2869, 2610, 3298, 2775, 3108, 2603, 2612, 2860, 3187, 3238, 3786, 4385, 3016, 3436, 2876, 2987, 3532, 3438, 3561, 3259, 2663, 2890, 3433, 3071, 3018, 2580, 2755, 3015, 2540, 3398, 2664, 2583, 2830, 2644, 2641, 3513, 2725, 2723, 3338, 3556, 2866, 2514, 2932, 2753, 2862, 2899, 2605, 2989, 3096, 3124, 2985, 2716, 3145, 3017, 2591, 2640, 3033, 3216, 3316, 3412, 2971, 3256, 3153, 3575, 3339, 2915, 2531, 3552, 3475, 3060, 3375, 2756, 3382, 2847, 2859, 3251, 3702, 3423, 2537, 2801, 3076, 2696, 3092, 3459, 3144, 3441, 2802, 3479, 2907, 3512, 3518, 3021, 2871, 3032, 2647, 2945, 3045, 2763, 3313, 3034, 3315, 3541, 2746, 2669, 2524, 3003, 2732, 3166, 3046, 3306, 2873, 3364, 3253, 3215, 3061, 2804, 2722, 2964, 2990, 2836, 3173, 2762, 3737, 2628, 3507, 2564, 3031, 2872, 3360, 2658, 2930, 2904, 3244, 3217, 3311, 3445, 2840, 3372, 2958, 3098, 3356, 3456, 3388, 2624, 3207, 2576, 2742, 2665, 2815, 3052, 3421, 2593, 3242, 2535, 2966, 2898, 2858, 2943, 2668, 2798, 3196, 2528, 2713, 3001, 2691, 2948, 2767, 2544, 3302, 2734, 2893, 2592, 2861, 3502, 2969, 2582, 3229, 2676, 2545, 3255, 3330, 2547, 3257, 2882, 3151, 3088, 2883, 3318, 2645, 2733, 2587, 3500, 3008, 2715, 2845, 3183, 2654, 3233, 3267, 2741, 2827, 2704, 3091, 2832, 2736, 3177, 3271, 2835, 2908, 3176, 2947, 3292, 3191, 2517, 3026, 3082, 3392, 3381, 2584, 2712, 3213, 3451, 2634, 3150, 2810, 3303, 2573, 3460, 2615, 3394, 2828, 3329, 4377, 4499, 3555, 2974, 3629, 3578, 3885, 2817, 3248, 2954, 3334, 3571, 3345, 3551, 3384, 3422, 2530, 2973, 4418, 4081, 3951, 1764, 1671, 1843, 3449, 3185, 3399, 2786, 3055, 3472, 3397, 2601, 3564, 3277, 4373, 3548, 3179, 3407, 3841, 3347, 3142, 4431, 3241, 3077, 2700, 3147, 2648, 3283, 2829, 3278, 2581, 2536, 4363, 2848, 3410, 2797, 2523, 2520, 2721, 3496, 2571, 3198, 3219, 3030, 2673, 2921, 3301, 3322, 2705, 3239, 2949, 3369, 3396, 2892, 2897, 2766, 3174, 3297, 2550, 2889, 2933, 2793, 2627, 2677, 3119, 2596, 3226, 3172, 3089, 2868, 2839, 3120, 3286, 2843, 3465, 3946, 4222, 2682, 2865, 3539, 3168, 2864, 3308, 3557, 2940, 3109, 3503, 2625, 3455, 3114, 2595, 3331, 2978, 2518, 2521, 4079, 3024, 3573, 2952, 2653, 3180, 2813, 2652, 2600, 2816, 3201, 3188, 3270, 2997, 2992, 3009, 3520, 2936, 3275, 3165, 3447, 3131, 3305, 2809, 2792, 2729, 2814, 2619, 3266, 2825, 3066, 2857, 2998, 3064, 2681, 3035, 3279, 2764, 3480, 3127, 2912, 3010, 2607, 3211, 3111, 3041, 4269, 3487, 3489, 3019, 1266, 1415, 2980, 3428, 3435, 3482, 3020, 2748, 2646, 2787, 2760, 2563, 3085, 3133, 3158, 3170, 2703, 3494, 2556, 2552, 3395, 3245, 3404, 2675, 2791, 1911, 908, 1935, 2749, 3341, 3355, 2575, 2942, 2886, 2758, 2594, 3495, 2884, 3516, 3042, 2737, 2923, 3563, 2855, 3476, 2611, 2937, 3383, 3497, 3402, 3162, 2662, 2875, 3223, 2878, 1808, 3285, 2757, 3057, 2951, 3519, 2579, 2853, 3387, 3401, 3493, 3393, 1608, 3365, 2885, 3574, 3081, 3007, 3568, 3152, 3367, 3358, 336, 3468, 3290, 3550, 3132, 2726, 2879, 3190, 3309, 2613, 2765, 3106, 1355, 3454, 2851, 2881, 3232, 3458, 3326, 3353, 2927, 3212, 2950, 3376, 3208, 3062, 3612, 3195, 3385, 2686, 2602, 3569, 3123, 2727, 1622, 2821, 2636, 2750, 2850, 3050, 2925, 3336, 3540, 2689, 3139, 2526, 3361, 3022, 3427, 3107, 3140, 3371, 3276, 2831, 3501, 2924, 3366, 3199, 3101, 3321, 3499, 2917, 2683, 2800, 2812, 3340, 3227, 3148, 3657, 4446, 1746, 1464, 1886, 2666, 3246, 3130, 3560, 3236, 2730, 3572, 3689, 2968, 1457, 3450, 2577, 2567, 2532, 3415, 2934, 2984, 2568, 4147, 3002, 2986, 910, 2979, 2542, 1762, 4472, 1529, 4057, 1976, 4507, 1583, 1711, 2013, 1594, 4440, 343, 344, 920, 921, 348, 4498, 3728, 3637, 3570, 3429, 4091, 2870, 2995, 4338, 3205, 2880, 3261, 3968, 4291, 4204, 4071, 4034, 1742, 2820, 3912, 3287, 1218, 1190, 4145, 354, 1782, 927, 3610, 356, 4224, 1918, 1959, 1840, 3736, 1770, 929, 930, 931, 4155, 360, 361, 362, 364, 1279, 365, 1543, 366, 367, 4049, 1633, 1722, 369, 1495, 1566, 373, 1211, 2494, 1726, 1442, 1748, 4142, 1434, 1358, 1191, 3732, 4110, 4039, 4411, 4506, 4156, 4036, 4030, 4016, 3899, 1247, 1855, 3919, 1244, 4140, 3930, 4117, 4189, 4001, 3643, 3619, 1240, 1575, 3871, 4135, 4408, 3604, 1274, 4149, 3741, 1938, 3709, 3622, 3834, 1983, 1743, 3979, 4461, 4113, 3817, 4232, 4214, 3902, 1219, 1486, 1512, 1516, 4047, 4082, 4094, 1574, 1248, 4078, 1872, 1426, 3785, 3687, 4318, 4243, 3866, 3704, 4172, 1513, 1856, 3324, 2769, 2678, 1561, 3296, 2348, 377, 1395, 1584, 4093, 4453, 3778, 4210, 4009, 4264, 4339, 1738, 4194, 4474, 4013, 4266, 1771, 1759, 1922, 3860, 3832, 1349, 1381, 3663, 1185, 3932, 3858, 1198, 4192, 3611, 1919, 3790, 3712, 4095, 1887, 4468, 1720, 4247, 934, 1790, 2002, 1657, 1336, 3894, 1554, 3576, 4314, 3695, 1850, 4362, 1815, 3656, 3638, 4454, 1443, 1661, 4504, 1359, 3650, 1305, 1648, 3831, 4435, 4451, 1993, 3849, 1718, 4068, 1835, 1425, 1428, 4380, 1658, 1452, 4024, 4072, 3791, 4491, 4323, 4014, 1304, 1511, 1981, 1676, 4422, 1283, 3861, 3644, 4259, 1749, 1418, 1176, 4216, 1924, 1421, 3992, 4423, 4253, 3748, 4119, 1297, 1299, 1954, 4450, 3990, 4029, 3711, 4344, 1578, 4384, 3892, 3674, 3595, 4405, 3973, 4109, 4159, 3744, 4387, 1960, 4275, 4492, 4365, 4118, 3655, 3886, 4278, 3751, 3678, 4353, 3175, 2970, 1228, 3534, 3437, 3406, 3641, 3639, 4470, 3941, 4348, 3587, 3818, 3814, 4350, 3821, 3929, 3824, 4465, 4494, 1398, 3828, 1284, 3773, 4209, 3014, 3884, 2783, 4038, 3545, 2916, 3112, 2834, 3880, 4399, 4048, 3752, 4207, 1235, 3943, 4355, 4087, 4100, 4163, 4486, 4178, 1643, 4152, 3634, 4445, 4303, 4284, 1213, 4382, 1399, 3714, 4487, 3615, 4018, 4420, 4121, 3724, 4282, 4310, 4488, 4127, 3670, 4052, 3627, 3777, 1371, 3685, 4482, 4258, 3812, 1581, 4124, 4508, 4500, 3652, 3972, 1309, 1528, 3717, 1217, 2740, 3125, 3546, 3842, 4404, 3690, 3962, 4329, 4410, 3703, 4136, 3589, 3907, 4153, 2707, 4180, 3923, 4444, 4361, 4394, 4302, 3758, 4510, 3742, 1710, 1335, 1666, 1407, 4187, 1193, 1188, 1196, 1724, 1717, 1200, 1997, 1701, 4280, 4006, 1984, 3833, 1593, 2561, 4442, 3900, 4298, 1761, 4388, 1597, 4317, 4249, 1341, 1203, 1680, 4441, 3628, 3725, 1945, 937, 4206, 1588, 1439, 3794, 4447, 3776, 3658, 4064, 4011, 4272, 4503, 1324, 1367, 3594, 3680, 1300, 1750, 3913, 3774, 1877, 1987, 3998, 1380, 4185, 3686, 3696, 4463, 3853, 4244, 4083, 1909, 3897, 1546, 3613, 3273, 3452, 3525, 1229, 3835, 1234, 3970, 3856, 3586, 1175, 4321, 2778, 4412, 4407, 1810, 3823, 1427, 1507, 1878, 4333, 3146, 4281, 4211, 1179, 3843, 1677, 1524, 1525, 1974, 1239, 4167, 3740, 1342, 1471, 4176, 1232, 1989, 4125, 1741, 1580, 4060, 1576, 1212, 3921, 1174, 4061, 4021, 3693, 3734, 1382, 3684, 3806, 3635, 3976, 3840, 4286, 3836, 4161, 3659, 3743, 3605, 4392, 4328, 1316, 4173, 4265, 1246, 1629, 1829, 3826, 1992, 1656, 1837, 1914, 1839, 3984, 3910, 4160, 4184, 4132, 4250, 1562, 1847, 1792, 3769, 1534, 4003, 1689, 1599, 1265, 1410, 1823, 1498, 1329, 386, 940, 1655, 3874, 4261, 3626, 3579, 1644, 3936, 4054, 4260, 4297, 4357, 4022, 4046, 1222, 1996, 3788, 3953, 4226, 4277, 4101, 3797, 4019, 3771, 3632, 1402, 4137, 3772, 3661, 4186, 4174, 1170, 3850, 1315, 1611, 1859, 4183, 1403, 4033, 3623, 3596, 1461, 1848, 1173, 1928, 1765, 3719, 3584, 3591, 4165, 4191, 3980, 4058, 4200, 4336, 3958, 1260, 4051, 3798, 4032, 1774, 4322, 3991, 4106, 3978, 3965, 4464, 3813, 4154, 1365, 3846, 4345, 4379, 3603, 1693, 3937, 3801, 1787, 1214, 4483, 4201, 1898, 1845, 1220, 4245, 1347, 3867, 1900, 3640, 3916, 4089, 3745, 3975, 4256, 4308, 4000, 3868, 4403, 3883, 4326, 4393, 3895, 4237, 3955, 4005, 4092, 4372, 4283, 3805, 4151, 3982, 3597, 3872, 3987, 4490, 3876, 3668, 4300, 1679, 1242, 3598, 3583, 3647, 4304, 3779, 1907, 4042, 3648, 3996, 3800, 4367, 4099, 1807, 3887, 4428, 1625, 1390, 1884, 1682, 4364, 4306, 3869, 1278, 942, 1505, 1542, 1709, 3600, 3914, 3948, 1865, 1716, 3961, 1506, 4221, 1376, 1683, 4276, 1721, 1632, 3607, 1455, 1913, 1497, 1317, 1951, 1778, 3768, 4225, 1668, 390, 4406, 4341, 1480, 392, 1714, 1422, 397, 3618, 4433, 1177, 3898, 398, 950, 400, 1965, 4471, 953, 401, 403, 955, 1482, 3602, 4434, 3721, 1592, 1825, 1698, 1519, 1352, 4409, 1977, 405, 1631, 1684, 409, 3889, 2117, 411, 413, 414, 415, 961, 1905, 416, 963, 3675, 1833, 3974, 965, 970, 1897, 1272, 971, 4133, 3830, 972, 424, 427, 1708, 4141, 3749, 1619, 975, 4044, 3590, 1944, 4126, 1923, 1706, 432, 976, 978, 4400, 433, 1606, 980, 2604, 2895, 436, 3448, 2188, 438, 1692, 982, 2243, 439, 442, 3862, 4055, 4358, 2276, 985, 1664, 443, 4309, 4045, 3854, 3682, 1972, 2688, 4366, 3425, 3231, 3649, 2759, 2724, 3755, 1216, 3599, 3775, 2754, 2606, 3471, 3234, 2565, 2803, 2562, 2684, 3411, 3405, 2690, 1255, 3694, 3985, 3535, 1306, 4084, 3282, 1353, 1780, 448, 2031, 990, 991, 1485, 992, 1728, 993, 4703, 994, 1696, 997, 998, 3116, 1869, 456, 1386, 4778, 2040, 1000, 4981, 3879, 2698, 460, 1001, 461, 1447, 1002, 1003, 463, 464, 4425, 465, 1004, 466, 469, 1231, 1468, 470, 2496, 1005, 476, 1273, 1744, 1488, 1659, 4598, 1604, 479, 1013, 1014, 481, 4313, 1499, 1016, 4073, 1777, 2172, 485, 4274, 4599, 4796, 487, 4710, 1775, 4205, 1526, 1697, 2000, 488, 1894, 1882, 1817, 1880, 490, 1018, 3917, 3616, 4311, 1800, 4473, 4085, 4401, 3783, 3765, 1538, 3870, 491, 3699, 3792, 4290, 2074, 492, 494, 2421, 4090, 2012, 1803, 3642, 1322, 1020, 502, 1333, 504, 4805, 1890, 507, 3608, 1732, 511, 2397, 1864, 1816, 1531, 513, 3636, 514, 1699, 1027, 4987, 1366, 4664, 4950, 4027, 3478, 2959, 1293, 3197, 1595, 3413, 518, 4698, 1032, 1033, 1675, 1797, 4578, 4854, 2315, 521, 1999, 3759, 1215, 4122, 1730, 3966, 1035, 4973, 528, 3911, 3289, 1821, 530, 2426, 532, 1874, 533, 1038, 538, 539, 3767, 1929, 3683, 2100, 4853, 1338, 2021, 1616, 1901, 1796, 1517, 4331, 4332, 4466, 2719, 4123, 4233, 1824, 3129, 3087, 3505, 4158, 4254, 3720, 4351, 4414, 3453, 3254, 1649, 544, 4240, 3580, 1046, 548, 549, 2598, 552, 553, 3819, 1259, 4062, 554, 2841, 3515, 1433, 1323, 4301, 555, 558, 3738, 1567, 559, 1054, 1270, 3857, 2175, 1257, 1238, 3662, 561, 1058, 563, 4872, 2097, 1061, 4203, 1899, 3981, 1062, 1303, 4116, 570, 1946, 3620, 1514, 4002, 3679, 3964, 3707, 3666, 1348, 4273, 1804, 4497, 571, 1401, 4438, 1895, 1264, 1912, 573, 3939, 4170, 4056, 1271, 1521, 1221, 1451, 3934, 4080, 4352, 1700, 3739, 1419, 1811, 3950, 1690, 3716, 1569, 1437, 1674, 4337, 1285, 4268, 1183, 3881, 3938, 4198, 4416, 4229, 4292, 4193, 4325, 4375, 4432, 4215, 3944, 1409, 4195, 4223, 1540, 4455, 4512, 1723, 3750, 4070, 4104, 4235, 1863, 4346, 1881, 1071, 1814, 4443, 3761, 1346, 1587, 3592, 576, 4469, 1275, 1950, 4129, 1296, 1551, 3733, 4111, 3993, 4108, 3949, 1287, 1713, 1556, 1736, 1995, 1705, 1861, 4120, 4417, 1292, 1785, 1236, 4293, 1827, 3839, 3983, 4395, 1957, 3928, 4295, 3715, 3855, 3609, 4076, 4175, 3927, 1757, 4299, 1773, 1364, 1462, 4007, 3729, 3665, 3722, 1691, 1712, 1624, 1751, 1394, 3924, 3952, 581, 2003, 1559, 1250, 1555, 4114, 1818, 1076, 4448, 1078, 1786, 3354, 1832, 3432, 2891, 4583, 1903, 1080, 4459, 589, 1563, 1084, 591, 592, 594, 595, 1858, 596, 598, 1453, 2559, 2590, 2738, 4478, 4069, 1809, 1327, 4150, 3260, 3481, 3672, 3625, 4439, 3852, 3997, 3847, 4050, 3377, 4424, 4143, 4493, 3492, 1412, 601, 4017, 4477, 1794, 602, 4263, 3072, 2009, 1754, 1088, 3888, 603, 604, 1368, 3827, 4103, 1571, 1438, 2069, 611, 1093, 612, 1094, 3701, 4389, 614, 5000, 615, 1332, 1715, 4369, 1652, 1541, 1921, 1733, 1373, 1870, 619, 4218, 1798, 1702, 1384, 3700, 1788, 1600, 624, 2473, 1423, 2771, 1339, 3875, 3070, 2015, 2557, 2795, 2906, 2103, 3299, 3118, 4838, 4965, 4605, 4576, 1103, 1614, 1947, 631, 4479, 3766, 1107, 635, 1813, 636, 2431, 637, 1109, 4577, 639, 3706, 1110, 640, 1111, 4581, 4644, 4734, 642, 3735, 3390, 1694, 3431, 2838, 3483, 3464, 3848, 2558, 3314, 3086, 3029, 2956, 3517, 2651, 2914, 2680, 2632, 3121, 3100, 3528, 3526, 3084, 4220, 3304, 2846, 1186, 3235, 2903, 3559, 2687, 3409, 3237, 2900, 2999, 3349, 3171, 2752, 3262, 3504, 3047, 3193, 3430, 2525, 2670, 2911, 3508, 2776, 2697, 3200, 2790, 3323, 2543, 2874, 2614, 3904, 3373, 3054, 2617, 4242, 3621, 2708, 4179, 4398, 3959, 1269, 3095, 1286, 3624, 4481, 3511, 2735, 4381, 3295, 1585, 1568, 1766, 3221, 2643, 2739, 4629, 3920, 4603, 2307, 647, 1801, 4279, 3762, 1637, 1509, 4590, 648, 1117, 4800, 4724, 4674, 1119, 2965, 2695, 3293, 4722, 1121, 4784, 653, 1122, 3264, 655, 656, 657, 4035, 2910, 3391, 2808, 3099, 2913, 3676, 2852, 3284, 2731, 3537, 3994, 1319, 4467, 1623, 660, 4714, 4812, 1123, 664, 2138, 1126, 1128, 1129, 1130, 670, 1527, 671, 1772, 1133, 2196, 1136, 1137, 5005, 1933, 1731, 1793, 3342, 1140, 1141, 4525, 687, 3822, 1601, 1148, 693, 3905, 694, 1414, 1149, 4756, 4859, 2258, 697, 1795, 1372, 1695, 1866, 1151, 4115, 1719, 2194, 1920, 4999, 1544, 703, 4031, 4305, 1636, 1393, 3810, 4452, 3677, 4227, 4402, 4157, 4197, 1337, 1253, 1532, 4028, 3989, 4715, 704, 1493, 1902, 1152, 4824, 4182, 707, 708, 709, 4732, 4476, 1375, 713, 714, 715, 1841, 4234, 1154, 1314, 4096, 4895, 718, 719, 720, 2063, 1311, 721, 4903, 4885, 4217, 1627, 2116, 1158, 724, 5013, 4894, 1953, 1201, 3787, 729, 2485, 3747, 730, 1846, 3815, 1964, 1822, 1262, 4480, 1537, 1291, 1318, 4976, 4294, 1582, 4587, 3439, 2833, 4287, 4509, 4505, 4267, 3697, 3272, 4112, 2967, 3651, 1805, 3705, 1195, 3859, 1164, 1165, 2351, 4835, 4571, 2423, 1745, 1973, 1168, 3807, 4307, 1169, 1454, or 1781.

23. The VP capsid polypeptide of claim 20, wherein the 581 to 589 region of the VP capsid polypeptide has a sequence of any one of SEQ ID NOs: 4177, 1289, 740, 3477, 1548, 3051, 2982, 2877, 3036, 3426, 3073, 3169, 747, 3362, 2784, 21, 3192, 1638, 748, 1703, 1836, 3660, 29, 750, 1640, 33, 35, 36, 1205, 3795, 753, 4288, 4219, 2770, 2962, 4241, 4107, 2718, 3317, 4391, 3263, 2553, 3947, 2710, 2608, 3467, 2796, 2961, 2529, 3320, 2674, 2635, 3446, 3053, 3250, 3688, 1998, 4320, 3351, 2655, 3514, 2779, 3194, 3319, 3224, 3281, 3708, 2807, 3562, 3274, 3374, 3013, 3416, 2981, 3065, 2777, 3469, 2977, 2638, 2972, 3059, 2574, 3380, 4262, 3167, 3368, 2781, 3547, 3386, 1225, 2960, 3485, 3370, 3443, 2824, 3327, 3178, 3006, 3252, 2991, 3470, 2888, 2572, 3418, 2642, 2519, 3363, 40, 2633, 45, 756, 48, 1952, 3122, 2551, 3718, 3484, 3577, 759, 3960, 1378, 2994, 3080, 2589, 3681, 760, 762, 3925, 3654, 60, 4086, 1740, 1660, 62, 1966, 63, 768, 66, 67, 68, 3816, 2599, 2706, 74, 3865, 1549, 1361, 2453, 3882, 3713, 1942, 1312, 4501, 76, 1560, 4289, 3757, 3593, 3908, 4397, 4415, 3723, 3754, 4360, 3945, 2854, 3523, 3669, 4065, 1294, 1484, 3891, 4456, 4040, 4496, 1982, 2001, 1478, 1189, 1490, 1885, 1926, 89, 1180, 92, 786, 94, 95, 1831, 1867, 4458, 97, 1970, 1936, 1590, 99, 789, 790, 1298, 101, 1688, 791, 792, 2007, 103, 104, 105, 108, 1579, 110, 1906, 1444, 1344, 116, 802, 117, 118, 121, 803, 1463, 124, 807, 133, 1978, 812, 135, 136, 137, 138, 140, 1326, 141, 142, 143, 1634, 1302, 817, 818, 147, 148, 149, 151, 154, 155, 819, 820, 157, 165, 822, 168, 169, 170, 823, 1651, 173, 1483, 174, 825, 176, 180, 827, 181, 828, 184, 185, 186, 188, 189, 830, 192, 193, 194, 196, 1391, 197, 200, 201, 202, 203, 205, 832, 206, 834, 835, 836, 1334, 3901, 3312, 2649, 1450, 4386, 3028, 1446, 215, 1522, 3490, 217, 219, 1612, 220, 221, 222, 839, 223, 840, 224, 230, 231, 842, 232, 233, 235, 851, 853, 1536, 240, 242, 243, 244, 245, 246, 247, 250, 251, 254, 255, 857, 256, 258, 259, 859, 260, 861, 862, 2326, 264, 1241, 266, 1477, 867, 869, 870, 271, 871, 872, 272, 1252, 1591, 275, 1980, 276, 876, 877, 277, 278, 1892, 1539, 3601, 3877, 1930, 1460, 282, 1799, 1626, 1374, 1620, 1290, 1354, 1956, 889, 292, 4324, 4138, 891, 3903, 297, 3829, 3809, 4271, 3844, 1436, 1617, 1961, 304, 1589, 4370, 3646, 4059, 1431, 1331, 312, 1779, 313, 896, 1558, 1552, 322, 1958, 324, 901, 1491, 329, 330, 4484, 1756, 3536, 2701, 2799, 3332, 3294, 3159, 3069, 2637, 3025, 2782, 3247, 3350, 2692, 2586, 3004, 3049, 2694, 2650, 3554, 2983, 3403, 3214, 3163, 2541, 3090, 3097, 3462, 1430, 2941, 3486, 2842, 3558, 3104, 3037, 3419, 2780, 2931, 1276, 2928, 2609, 3068, 3128, 2548, 2538, 2618, 2789, 3228, 2657, 3189, 2863, 3307, 3300, 2546, 3048, 3543, 2946, 2975, 3346, 3067, 2728, 2955, 3408, 3027, 3094, 3203, 2988, 2751, 2953, 2566, 2578, 2823, 3063, 3335, 3000, 3181, 3011, 3138, 3389, 2805, 3074, 2894, 3149, 2560, 3417, 3265, 3378, 2901, 2837, 2822, 2745, 3473, 3530, 3040, 2597, 3509, 3522, 3161, 2926, 3209, 3105, 3400, 2630, 2905, 2671, 2818, 2806, 2702, 2709, 3549, 3538, 2534, 2773, 2623, 3491, 3243, 3136, 2693, 3164, 3343, 2918, 2555, 2794, 2679, 3510, 3110, 2672, 3442, 2929, 3184, 3488, 3093, 2996, 3141, 3544, 3102, 2856, 2957, 3466, 3461, 2788, 2660, 3344, 3204, 2720, 3379, 2826, 1789, 2785, 3249, 3527, 4460, 3352, 2569, 4457, 2011, 4319, 3906, 1533, 1755, 4248, 1557, 1602, 4188, 1330, 4349, 3337, 3533, 2629, 3038, 2539, 3567, 3291, 3348, 3115, 3359, 2993, 3079, 3506, 2527, 2963, 2938, 2516, 3113, 2639, 3143, 3044, 2747, 3154, 3280, 3039, 2743, 2902, 3056, 2554, 2522, 3103, 3210, 3434, 2656, 4251, 4196, 3206, 3328, 2588, 3553, 2714, 3078, 3222, 3137, 3357, 2717, 2944, 3012, 3220, 3202, 2811, 3083, 3269, 3566, 2699, 2515, 3023, 2533, 3288, 3075, 3005, 2685, 3058, 2976, 2622, 3333, 3463, 2939, 3521, 3268, 3117, 2626, 2616, 3240, 2570, 3565, 2919, 3157, 2849, 3444, 2631, 3420, 2659, 3325, 3186, 2920, 3258, 3440, 3457, 3310, 2761, 3134, 2621, 3531, 2711, 2774, 2867, 2585, 3155, 2620, 3156, 2844, 3126, 3160, 2909, 3542, 3225, 2887, 3474, 3218, 2744, 2896, 3135, 3424, 3498, 3529, 2661, 2667, 2549, 2819, 2768, 2935, 3182, 2772, 3230, 3043, 2922, 3581, 2869, 2610, 3298, 2775, 3108, 2603, 2612, 2860, 3187, 3238, 3786, 4385, 3016, 3436, 2876, 2987, 3532, 3438, 3561, 3259, 2663, 2890, 3433, 3071, 3018, 2580, 2755, 3015, 2540, 3398, 2664, 2583, 2830, 2644, 2641, 3513, 2725, 2723, 3338, 3556, 2866, 2514, 2932, 2753, 2862, 2899, 2605, 2989, 3096, 3124, 2985, 2716, 3145, 3017, 2591, 2640, 3033, 3216, 3316, 3412, 2971, 3256, 3153, 3575, 3339, 2915, 2531, 3552, 3475, 3060, 3375, 2756, 3382, 2847, 2859, 3251, 3702, 3423, 2537, 2801, 3076, 2696, 3092, 3459, 3144, 3441, 2802, 3479, 2907, 3512, 3518, 3021, 2871, 3032, 2647, 2945, 3045, 2763, 3313, 3034, 3315, 3541, 2746, 2669, 2524, 3003, 2732, 3166, 3046, 3306, 2873, 3364, 3253, 3215, 3061, 2804, 2722, 2964, 2990, 2836, 3173, 2762, 3737, 2628, 3507, 2564, 3031, 2872, 3360, 2658, 2930, 2904, 3244, 3217, 3311, 3445, 2840, 3372, 2958, 3098, 3356, 3456, 3388, 2624, 3207, 2576, 2742, 2665, 2815, 3052, 3421, 2593, 3242, 2535, 2966, 2898, 2858, 2943, 2668, 2798, 3196, 2528, 2713, 3001, 2691, 2948, 2767, 2544, 3302, 2734, 2893, 2592, 2861, 3502, 2969, 2582, 3229, 2676, 2545, 3255, 3330, 2547, 3257, 2882, 3151, 3088, 2883, 3318, 2645, 2733, 2587, 3500, 3008, 2715, 2845, 3183, 2654, 3233, 3267, 2741, 2827, 2704, 3091, 2832, 2736, 3177, 3271, 2835, 2908, 3176, 2947, 3292, 3191, 2517, 3026, 3082, 3392, 3381, 2584, 2712, 3213, 3451, 2634, 3150, 2810, 3303, 2573, 3460, 2615, 3394, 2828, 3329, 4377, 4499, 3555, 2974, 3629, 3578, 3885, 2817, 3248, 2954, 3334, 3571, 3345, 3551, 3384, 3422, 2530, 2973, 4418, 4081, 3951, 1764, 1671, 1843, 3449, 3185, 3399, 2786, 3055, 3472, 3397, 2601, 3564, 3277, 4373, 3548, 3179, 3407, 3841, 3347, 3142, 4431, 3241, 3077, 2700, 3147, 2648, 3283, 2829, 3278, 2581, 2536, 4363, 2848, 3410, 2797, 2523, 2520, 2721, 3496, 2571, 3198, 3219, 3030, 2673, 2921, 3301, 3322, 2705, 3239, 2949, 3369, 3396, 2892, 2897, 2766, 3174, 3297, 2550, 2889, 2933, 2793, 2627, 2677, 3119, 2596, 3226, 3172, 3089, 2868, 2839, 3120, 3286, 2843, 3465, 3946, 4222, 2682, 2865, 3539, 3168, 2864, 3308, 3557, 2940, 3109, 3503, 2625, 3455, 3114, 2595, 3331, 2978, 2518, 2521, 4079, 3024, 3573, 2952, 2653, 3180, 2813, 2652, 2600, 2816, 3201, 3188, 3270, 2997, 2992, 3009, 3520, 2936, 3275, 3165, 3447, 3131, 3305, 2809, 2792, 2729, 2814, 2619, 3266, 2825, 3066, 2857, 2998, 3064, 2681, 3035, 3279, 2764, 3480, 3127, 2912, 3010, 2607, 3211, 3111, 3041, 4269, 3487, 3489, 3019, 1266, 3435, 3482, 3020, 2748, 2646, 2787, 2760, 2563, 3085, 3133, 3158, 3170, 2703, 3494, 2552, 3395, 3245, 3404, 2675, 2791, 1911, 908, 1935, 2749, 3341, 3355, 2575, 2942, 2886, 2758, 2594, 3495, 2884, 3516, 3042, 2737, 2923, 3563, 2855, 3476, 2611, 2937, 3383, 3497, 3402, 3162, 2662, 2875, 3223, 2878, 1808, 3285, 2757, 3057, 2951, 3519, 2579, 2853, 3387, 3401, 3493, 3393, 1608, 3365, 2885, 3574, 3081, 3007, 3568, 3152, 3367, 3358, 336, 3468, 3290, 3550, 3132, 2726, 2879, 3190, 3309, 2613, 2765, 3106, 1355, 3454, 2851, 2881, 3232, 3458, 3326, 3353, 2927, 3212, 2950, 3376, 3208, 3062, 3612, 3195, 3385, 2686, 2602, 3569, 3123, 2727, 1622, 2821, 2636, 2750, 2850, 3050, 2925, 3336, 3540, 2689, 3139, 2526, 3361, 3022, 3427, 3107, 3140, 3371, 3276, 2831, 3501, 2924, 3366, 3199, 3101, 3321, 3499, 2917, 2683, 2800, 2812, 3340, 3227, 3148, 3657, 4446, 1746, 1464, 1886, 2666, 3246, 3130, 3560, 3236, 2730, 3572, 3689, 2968, 1457, 3450, 2577, 2567, 2532, 3415, 2934, 2984, 2568, 4147, 3002, 2986, 2979, 2542, 1762, 4472, 1529, 4057, 1976, 4507, 1583, 1711, 2013, 1594, 4440, 344, 921, 4498, 3728, 3637, 3570, 3429, 4091, 2870, 2995, 4338, 3205, 2880, 3261, 3968, 4291, 4204, 4071, 4034, 1742, 2820, 3912, 3287, 4145, 354, 1782, 927, 3610, 4224, 1918, 1959, 3736, 1770, 931, 4155, 364, 1279, 365, 1543, 367, 4049, 1633, 1722, 369, 1495, 1566, 1211, 1748, 4142, 1434, 1358, 1191, 3732, 4110, 4039, 4411, 4506, 4156, 4036, 4030, 4016, 3899, 1247, 1855, 3919, 1244, 4140, 3930, 4117, 4189, 4001, 3643, 3619, 1240, 1575, 3871, 4135, 4408, 3604, 1274, 3741, 1938, 3709, 3622, 3834, 1983, 1743, 3979, 4461, 4113, 3817, 4232, 4214, 1219, 1486, 1512, 1516, 4047, 4082, 4094, 1574, 1248, 4078, 1872, 1426, 3785, 3687, 4318, 4243, 3866, 3704, 4172, 1513, 1856, 3324, 2769, 2678, 1561, 3296, 377, 1395, 4093, 4453, 3778, 4210, 4009, 4264, 4339, 1738, 4194, 4474, 4013, 4266, 1771, 3860, 3832, 1349, 1381, 3663, 1185, 3932, 3858, 1198, 4192, 3611, 1919, 3790, 3712, 4095, 1887, 4468, 1720, 4247, 2002, 1657, 1336, 3894, 1554, 3576, 4314, 3695, 4362, 1815, 3656, 3638, 4454, 1443, 1661, 1359, 3650, 1648, 3831, 4435, 4451, 1993, 3849, 1718, 4068, 1835, 1425, 1428, 4380, 1658, 1452, 4024, 4072, 3791, 4491, 4323, 4014, 1304, 1511, 1981, 1676, 4422, 3748, 4119, 1297, 1299, 4450, 3990, 4029, 3711, 4344, 1578, 4384, 3892, 3674, 3595, 4405, 3973, 4109, 4159, 3744, 4387, 1960, 4275, 4492, 4365, 4118, 3655, 3886, 4278, 3751, 3678, 4353, 3175, 2970, 1228, 3534, 3437, 3406, 3641, 3639, 4470, 3941, 4348, 3587, 3818, 3814, 4350, 3821, 3929, 3824, 4465, 4494, 1398, 3828, 1284, 3773, 4209, 3014, 3884, 2783, 4038, 3545, 2916, 3112, 2834, 3880, 4399, 4048, 3752, 4207, 1235, 3943, 4355, 4087, 4100, 4163, 4486, 4178, 1643, 4152, 3634, 4445, 4303, 4284, 1213, 4382, 1399, 3714, 4487, 3615, 4018, 4420, 4121, 3724, 4282, 4310, 4488, 4127, 3670, 4052, 4124, 4508, 4500, 3652, 3972, 1309, 1528, 3717, 1217, 2740, 3125, 3546, 3842, 4404, 3690, 3962, 4329, 4410, 3703, 4136, 3589, 3907, 4153, 2707, 4180, 3923, 4444, 4361, 4394, 4302, 3758, 4510, 3742, 1710, 1335, 1997, 1701, 4280, 4006, 1984, 3833, 1593, 2561, 4442, 3900, 4298, 1761, 4388, 1597, 4317, 4249, 1341, 1680, 4441, 3628, 3725, 1945, 937, 4206, 1588, 1439, 3794, 4447, 3776, 3658, 4064, 4011, 4272, 4503, 1367, 3594, 3680, 1300, 1750, 3913, 3774, 1877, 1987, 3998, 1380, 4185, 3686, 3696, 4463, 3853, 4244, 4083, 1909, 3897, 1546, 3613, 3273, 3452, 3525, 1229, 3835, 1234, 3970, 3856, 3586, 1175, 4321, 2778, 4412, 4407, 1810, 3823, 1427, 1507, 1878, 4333, 3146, 4281, 4211, 1179, 3843, 1677, 1524, 1525, 1974, 1239, 4167, 3740, 1342, 4125, 1580, 4060, 1576, 1212, 3921, 1174, 4061, 4021, 3693, 3734, 1382, 3684, 3806, 3635, 3976, 3840, 4286, 3836, 4161, 3659, 3743, 3605, 4392, 4328, 1316, 4173, 4265, 1246, 1629, 1829, 1837, 1914, 1839, 3984, 3910, 4160, 4184, 4132, 4250, 1562, 1847, 1792, 3769, 1534, 4003, 1689, 1599, 1265, 1655, 3874, 4261, 3626, 3579, 1644, 3936, 4054, 4260, 4297, 4357, 4022, 4046, 1222, 1996, 3788, 3953, 4226, 4277, 4101, 3797, 4019, 3771, 3632, 1402, 4137, 3772, 3661, 4186, 4174, 1170, 3850, 1315, 1611, 4033, 3623, 3596, 1461, 1848, 1173, 1928, 1765, 3719, 3584, 3591, 4165, 4191, 3980, 4058, 4200, 4336, 3958, 1260, 4051, 3798, 4032, 1774, 4322, 3991, 4106, 3978, 3965, 4464, 3813, 4154, 1365, 3846, 4345, 4379, 3603, 1693, 3937, 3801, 1787, 1214, 4483, 4201, 1898, 1220, 4245, 1347, 3867, 1900, 3640, 3916, 4089, 3745, 3975, 4256, 4308, 4000, 3868, 4403, 3883, 4326, 4393, 3895, 4237, 3955, 4005, 4092, 4372, 4283, 3805, 4151, 3982, 3597, 3872, 3987, 4490, 3876, 3668, 4300, 1679, 1242, 3598, 3583, 3647, 4304, 3779, 1907, 4042, 3648, 3996, 3800, 4367, 4099, 1807, 3887, 4428, 1625, 1390, 1884, 1682, 4364, 4306, 3869, 1278, 942, 1505, 1542, 1709, 3600, 3914, 3948, 1865, 1716, 3961, 1506, 4221, 1376, 1683, 4276, 1721, 1632, 3607, 1455, 1913, 1497, 1317, 1951, 1778, 3768, 4225, 1668, 390, 4406, 4341, 1480, 1714, 1422, 397, 3618, 4433, 1177, 3898, 398, 950, 400, 1965, 4471, 4031, 482, 3602, 4434, 3721, 1592, 1519, 1352, 4409, 1977, 1631, 1684, 409, 3889, 414, 415, 961, 1905, 416, 963, 3675, 1833, 3974, 965, 970, 1897, 4133, 3830, 972, 424, 427, 1708, 4141, 3749, 1619, 975, 4044, 3590, 1944, 4126, 1923, 1706, 4400, 1606, 2604, 2895, 436, 3448, 1692, 3862, 4055, 4358, 985, 1664, 4045, 3854, 3682, 1972, 2688, 4366, 3425, 3231, 3649, 2759, 2724, 3755, 1216, 3599, 3775, 2754, 2606, 3471, 3234, 2565, 2803, 2562, 2684, 3411, 3405, 2690, 1255, 3694, 3535, 1306, 4084, 3282, 1780, 990, 991, 992, 1728, 994, 1696, 998, 3116, 1869, 456, 1386, 3879, 2698, 1001, 461, 1447, 464, 4425, 1231, 1468, 476, 1273, 1744, 1488, 1659, 1604, 481, 4313, 1499, 1016, 4073, 1777, 4274, 487, 1775, 4205, 1526, 1697, 2000, 1882, 1817, 1880, 490, 1018, 3917, 3616, 4311, 1800, 4473, 4085, 4401, 3783, 3765, 491, 3699, 3792, 4290, 4090, 2012, 1803, 3642, 1322, 502, 1333, 1890, 3608, 1732, 511, 2397, 1864, 1816, 1531, 3636, 1699, 1027, 1366, 4027, 3478, 2959, 3197, 1595, 3413, 518, 1675, 1797, 2315, 1999, 3759, 1215, 4122, 1730, 3966, 3911, 3289, 1821, 530, 1874, 1038, 3767, 1929, 3683, 1338, 1517, 4331, 4332, 4466, 2719, 4123, 4233, 1824, 3129, 3087, 3505, 4158, 4254, 3720, 4351, 4414, 3453, 3254, 1649, 544, 4240, 3580, 1046, 2598, 552, 3819, 1259, 4062, 2841, 3515, 4301, 3738, 1567, 1270, 3857, 1257, 1238, 3662, 561, 1058, 1061, 4203, 1899, 3981, 1062, 1303, 4116, 1946, 3620, 1514, 4002, 3679, 3964, 3707, 3666, 1348, 4273, 1804, 4497, 1401, 4438, 1895, 1264, 1912, 3939, 4170, 4056, 1271, 1521, 1221, 1451, 3934, 4080, 4352, 1700, 3739, 1419, 1811, 3950, 1690, 3716, 1437, 1674, 4337, 1285, 4268, 1183, 3881, 3938, 4198, 4416, 4229, 4292, 4193, 4325, 4375, 4432, 4215, 3944, 1409, 4195, 4223, 1540, 1723, 3750, 4070, 4104, 4235, 1863, 4346, 1881, 1814, 4443, 3761, 1346, 1587, 3592, 576, 4469, 1275, 1950, 4129, 1296, 1551, 3733, 4111, 3993, 4108, 3949, 1287, 1713, 1736, 1995, 1705, 1861, 4120, 4417, 1785, 1236, 4293, 3839, 3983, 4395, 1957, 3928, 4295, 3715, 3855, 3609, 4076, 4175, 3927, 1757, 4299, 1773, 1364, 1462, 4007, 3729, 3665, 3722, 1691, 1624, 1751, 1394, 3924, 3952, 581, 2003, 1559, 1250, 1555, 4114, 1818, 1076, 4448, 1078, 1786, 3354, 1832, 3432, 2891, 1903, 4459, 1563, 591, 594, 598, 1453, 2559, 2590, 2738, 4478, 4069, 1809, 1327, 4150, 3260, 3481, 3672, 3625, 4439, 3852, 3997, 3847, 4050, 3377, 4424, 4143, 4493, 3492, 601, 4017, 4477, 1794, 4263, 3072, 2009, 1754, 1088, 3888, 1368, 3827, 4103, 1571, 1438, 1093, 612, 1094, 3701, 4389, 1332, 1715, 4369, 1652, 1541, 1921, 1733, 1373, 1870, 619, 4218, 1798, 1702, 1384, 3700, 1788, 1600, 624, 2771, 1339, 3875, 3070, 2557, 2795, 2906, 3118, 1614, 1947, 4479, 3766, 635, 1813, 636, 3706, 1110, 640, 1111, 642, 1694, 3431, 2838, 3483, 3464, 3848, 2558, 3314, 3086, 3029, 2956, 3517, 2651, 2914, 2680, 2632, 3121, 3100, 3528, 3526, 3084, 4220, 3304, 2846, 1186, 3235, 2903, 3559, 2687, 3409, 3237, 2900, 2999, 3349, 3171, 2752, 3262, 3504, 3047, 3193, 3430, 2525, 2670, 2911, 3508, 2776, 2697, 3200, 2790, 3323, 2543, 2874, 2614, 3904, 3373, 3054, 2617, 4242, 3621, 2708, 4179, 4398, 3959, 3095, 1286, 3624, 4481, 3511, 2735, 4381, 3295, 1585, 1766, 3221, 2643, 2739, 3920, 2307, 647, 1801, 4279, 3762, 1637, 1509, 1119, 2965, 2695, 3293, 1121, 1122, 3264, 655, 4035, 2910, 3391, 2808, 3099, 2913, 3676, 2852, 3284, 2731, 3994, 1319, 4467, 1623, 664, 1128, 1129, 1130, 670, 1527, 671, 1772, 5005, 1933, 1731, 1793, 3342, 3822, 1601, 3905, 694, 1414, 1795, 1372, 1695, 1866, 4115, 1719, 1920, 1544, 703, 4031, 4305, 1636, 1393, 3810, 4452, 3677, 4227, 4402, 4157, 4197, 1337, 1253, 1532, 4028, 3989, 1493, 1902, 4182, 707, 708, 4476, 714, 1841, 4234, 1314, 4096, 4217, 1627, 1953, 1201, 3787, 3747, 730, 1846, 3815, 1964, 1822, 1262, 4480, 1537, 1291, 1318, 4294, 1582, 3439, 2833, 4287, 4509, 4505, 4267, 3697, 3272, 4112, 2967, 3651, 3705, 1195, 3859, 1164, 1165, 1745, 1973, 1168, 3807, 4307, 1454, or 1781.

24. The VP capsid polypeptide of any one of claims 20-23, wherein the basic residue is selected from the group consisting of K, R, and H.

25. The VP capsid polypeptide of any one of claims 20-24, wherein X³ of SEQ ID NO: 5014 is K or R.

26. The VP capsid polypeptide of claim 25, wherein the 581 to 589 region of the VP capsid polypeptide has a sequence of any one of SEQ ID NOs: 4177, 1289, 740, 741, 18, 745, 3477, 1548, 3051, 2982, 2877, 3036, 3426, 3073, 3169, 747, 3362, 2784, 21, 3192, 23, 1638, 748, 1703, 1836, 3660, 29, 750, 1640, 33, 34, 35, 36, 37, 38, 1205, 3795, 753, 4288, 4219, 2770, 2962, 4241, 4107, 2718, 3317, 4391, 4053, 3263, 2553, 3947, 2710, 2608, 3467, 2796, 2961, 2529, 3320, 2674, 2635, 3446, 3053, 3250, 3688, 1182, 1998, 4320, 3351, 2655, 3514, 2779, 3194, 3319, 3224, 3281, 3708, 2807, 3562, 3274, 3374, 3013, 3416, 2981, 3065, 2777, 3469, 2977, 2638, 2972, 3059, 2574, 3380, 4262, 3167, 3368, 2781, 3547, 3386, 1225, 2960, 3485, 3370, 3443, 2824, 3327, 3178, 3006, 3252, 2991, 3470, 2888, 2572, 3418, 2642, 2519, 3363, 40, 2633, 41, 42, 43, 755, 45, 756, 46, 48, 1952, 758, 49, 3122, 2551, 3718, 3484, 3577, 759, 1230, 3960, 1378, 2994, 3080, 2589, 3681, 760, 53, 3925, 55, 3654, 56, 61, 4086, 1740, 1660, 765, 766, 62, 1966, 63, 64, 768, 771, 65, 66, 67, 68, 3816, 2599, 2706, 74, 3865, 1549, 1361, 3882, 3713, 1942, 1312, 4501, 76, 77, 1560, 4289, 3757, 79, 3593, 4043, 1806, 3908, 4397, 1615, 4415, 3723, 2006, 3754, 1470, 4360, 3945, 2854, 3523, 3669, 82, 4065, 83, 1294, 1484, 3891, 4456, 4040, 4496, 1982, 2001, 1478, 1189, 1490, 1885, 1926, 89, 90, 91, 779, 1180, 92, 785, 786, 94, 95, 1831, 1867, 4458, 97, 1970, 1936, 1590, 100, 789, 790, 1298, 101, 1688, 791, 792, 2007, 103, 794, 795, 104, 105, 106, 1849, 108, 1579, 110, 1906, 113, 1444, 1344, 116, 802, 117, 118, 121, 803, 804, 1463, 805, 122, 124, 125, 127, 807, 132, 809, 810, 133, 1978, 812, 135, 136, 137, 138, 813, 140, 815, 1326, 141, 142, 143, 144, 145, 1634, 1302, 817, 146, 818, 147, 148, 149, 151, 152, 153, 154, 155, 819, 820, 157, 159, 160, 163, 164, 165, 166, 822, 167, 168, 169, 170, 171, 823, 824, 1651, 173, 1483, 174, 175, 825, 176, 177, 826, 827, 181, 828, 182, 829, 184, 185, 186, 187, 188, 189, 830, 191, 192, 193, 194, 195, 196, 1391, 197, 200, 201, 202, 203, 204, 205, 832, 833, 206, 834, 836, 1334, 837, 3901, 3312, 2649, 1301, 211, 212, 1450, 4386, 3028, 213, 1446, 214, 215, 1896, 1522, 3490, 838, 217, 218, 219, 1612, 220, 221, 222, 839, 223, 840, 224, 226, 227, 230, 231, 842, 232, 233, 844, 236, 237, 851, 852, 853, 1536, 240, 854, 242, 243, 244, 245, 246, 247, 249, 250, 251, 252, 253, 254, 255, 857, 256, 257, 258, 259, 858, 859, 260, 261, 860, 861, 862, 262, 264, 1241, 265, 266, 866, 1477, 267, 867, 869, 870, 271, 871, 872, 272, 1252, 273, 1591, 275, 1980, 276, 876, 877, 277, 278, 279, 1892, 1539, 880, 1295, 3601, 3877, 1930, 1420, 1678, 1460, 282, 1799, 283, 1626, 1374, 287, 1620, 1290, 1354, 888, 291, 1956, 889, 292, 4324, 293, 4138, 891, 3903, 297, 3829, 3809, 4271, 3844, 1436, 1515, 1617, 1961, 304, 306, 1589, 4370, 308, 309, 894, 3646, 4059, 1431, 1331, 312, 895, 1779, 313, 314, 315, 316, 896, 1558, 1552, 898, 321, 322, 899, 1958, 901, 325, 902, 326, 1491, 329, 330, 905, 4484, 1756, 3536, 2701, 2799, 3332, 3294, 3159, 3069, 2637, 3025, 2782, 3247, 3350, 2692, 2586, 3004, 3049, 2694, 2650, 3554, 2983, 3403, 3214, 3163, 2541, 3090, 3097, 3462, 1430, 2941, 3486, 2842, 3558, 3104, 3037, 3419, 2780, 2931, 1276, 2928, 2609, 3068, 3128, 2548, 2538, 2618, 2789, 3228, 2657, 3189, 2863, 3307, 3300, 2546, 3048, 3543, 2946, 2975, 3346, 3067, 2728, 2955, 3408, 3027, 3094, 3203, 2988, 2751, 2953, 2566, 2578, 2823, 3063, 3335, 3000, 3181, 3011, 3138, 3389, 2805, 3074, 2894, 3149, 2560, 3417, 3265, 3378, 2901, 2837, 2822, 2745, 3473, 3530, 3040, 2597, 3509, 3522, 3161, 2926, 3209, 3105, 3400, 2630, 2905, 2671, 2818, 2806, 2702, 2709, 3549, 3538, 2534, 2773, 2623, 3491, 3243, 3136, 2693, 3164, 3343, 2918, 2555, 2794, 2679, 3510, 3110, 2672, 3442, 2929, 3184, 3488, 3093, 2996, 3141, 3544, 3102, 2856, 2957, 3466, 3461, 2788, 2660, 3344, 3204, 2720, 3379, 2826, 1789, 2785, 3249, 3527, 4460, 3352, 2569, 4457, 2011, 4319, 3906, 1533, 1755, 1888, 4248, 1557, 1404, 4188, 1330, 4349, 3337, 3533, 2629, 3038, 2539, 3567, 3291, 3348, 3115, 3359, 2993, 3079, 3506, 2527, 2963, 2938, 2516, 3113, 1345, 2639, 3143, 3044, 2747, 3154, 3280, 3039, 2743, 2902, 3056, 2554, 2522, 3103, 3210, 3434, 2656, 4251, 4166, 4196, 3206, 3328, 2588, 3553, 2714, 3078, 3222, 3137, 3357, 2717, 2944, 3012, 3220, 3202, 2811, 3083, 3269, 3566, 2699, 2515, 3023, 2533, 3288, 3075, 3005, 2685, 3058, 2976, 2622, 3333, 3463, 2939, 3521, 3268, 3117, 2626, 2616, 3240, 2570, 3565, 2919, 3157, 2849, 3444, 2631, 3420, 2659, 3325, 3186, 2920, 3258, 3440, 3457, 3310, 2761, 3134, 2621, 3531, 2711, 2774, 2867, 2585, 3155, 2620, 3156, 2844, 3126, 3160, 2909, 3542, 3225, 2887, 3474, 3218, 2744, 2896, 3135, 3424, 3498, 3529, 2661, 2667, 2549, 2819, 2768, 2935, 3182, 2772, 3230, 3043, 2922, 3581, 3524, 2869, 2610, 3298, 2775, 3108, 2603, 3614, 2612, 2860, 3187, 3238, 3786, 4385, 3016, 3436, 2876, 2987, 3532, 3438, 3561, 3259, 2663, 2890, 3433, 3071, 3018, 2580, 2755, 3015, 2540, 3398, 2664, 2583, 2830, 2644, 2641, 3513, 2725, 2723, 3338, 3556, 2866, 2514, 2932, 2753, 2862, 2899, 2605, 2989, 3096, 3124, 2985, 2716, 3145, 3017, 2591, 2640, 3033, 1853, 3216, 3316, 3412, 2971, 3256, 3153, 3575, 3339, 2915, 2531, 3552, 3475, 3060, 3375, 2756, 3382, 2847, 2859, 3251, 3702, 3423, 2537, 2801, 3076, 2696, 3092, 3459, 3144, 3441, 2802, 3479, 2907, 3512, 3518, 3021, 2871, 3032, 2647, 2945, 3045, 2763, 3313, 3034, 3315, 3541, 2746, 2669, 2524, 3003, 2732, 3166, 3046, 3306, 2873, 3364, 3253, 3215, 3061, 2804, 2722, 2964, 2990, 2836, 4098, 4449, 3173, 2762, 3737, 2628, 3507, 2564, 3031, 2872, 3360, 2658, 2930, 2904, 3244, 3217, 3311, 3445, 2840, 3372, 2958, 3098, 3356, 3456, 3388, 2624, 3207, 2576, 2742, 2665, 2815, 3052, 3421, 2593, 3242, 2535, 2966, 2898, 2858, 2943, 2668, 2798, 3196, 2528, 2713, 3001, 2691, 2948, 2767, 2544, 3302, 2734, 2893, 2592, 2861, 3502, 2969, 2582, 3229, 2676, 2545, 3255, 3330, 2547, 3257, 2882, 3151, 3088, 2883, 3318, 2645, 2733, 2587, 3500, 3008, 2715, 2845, 3183, 2654, 3233, 3267, 2741, 2827, 2704, 3091, 2832, 2736, 3177, 3271, 2835, 2908, 3176, 2947, 3292, 3191, 2517, 3026, 3082, 3392, 3381, 2584, 2712, 3213, 3451, 2634, 3150, 2810, 3303, 2573, 3460, 2615, 3394, 2828, 3329, 4377, 4499, 3555, 2974, 3782, 3629, 3578, 3885, 2817, 3248, 2954, 3334, 3571, 3345, 3551, 3384, 3422, 1357, 1844, 2530, 2973, 4418, 4081, 3951, 1764, 1671, 1843, 3449, 3185, 3399, 2786, 3055, 3472, 3397, 2601, 3564, 3277, 4373, 3548, 3179, 3407, 3841, 3347, 3142, 4255, 4431, 3241, 3077, 2700, 3147, 2648, 3283, 2829, 3278, 2581, 2536, 4363, 2848, 3410, 2797, 2523, 2520, 2721, 3496, 2571, 3198, 3219, 3030, 2673, 2921, 3837, 3301, 3322, 2705, 3239, 2949, 3369, 3396, 2892, 2897, 2766, 3174, 3297, 2550, 2889, 2933, 2793, 2627, 2677, 3119, 2596, 3226, 3172, 3089, 2868, 2839, 3942, 3120, 3286, 2843, 3465, 1564, 3946, 4222, 1504, 3999, 2682, 1875, 2865, 3539, 3168, 2864, 3308, 3557, 2940, 3109, 3503, 2625, 3455, 3114, 2595, 3331, 2978, 2518, 2521, 4079, 3024, 3573, 2952, 2653, 1769, 3180, 2813, 2652, 2600, 2816, 3201, 3188, 3270, 2997, 2992, 3009, 3520, 2936, 3275, 3165, 3447, 3131, 3305, 2809, 2792, 2729, 2814, 2619, 3266, 2825, 3066, 2857, 2998, 3064, 2681, 3035, 3279, 2764, 3480, 3127, 2912, 3010, 2607, 3211, 3111, 3041, 1573, 3909, 4269, 3487, 3489, 3019, 335, 1266, 3435, 3482, 3020, 2748, 2646, 2787, 2760, 2563, 3085, 3133, 3158, 3170, 2703, 3494, 2552, 3395, 3245, 3404, 2675, 2791, 1911, 908, 1935, 2749, 3341, 3355, 2575, 2942, 2886, 2758, 2594, 3495, 2884, 3516, 3042, 2737, 2923, 3563, 2855, 3476, 2611, 2937, 3383, 3497, 3402, 3162, 2662, 2875, 3223, 2878, 1808, 3285, 2757, 3057, 2951, 3519, 2579, 2853, 3387, 3401, 3493, 3393, 1608, 3365, 2885, 3574, 3081, 3007, 3568, 3152, 3367, 3358, 336, 3468, 3290, 3550, 3132, 2726, 2879, 3190, 3309, 2613, 2765, 3106, 1355, 3454, 2851, 2881, 3232, 3458, 3326, 3353, 2927, 3212, 2950, 3376, 3208, 3062, 3612, 3195, 3385, 2686, 2602, 3569, 3123, 2727, 1622, 2821, 2636, 2750, 2850, 3050, 2925, 3336, 3540, 2689, 3139, 2526, 3361, 3022, 3427, 3107, 3140, 3371, 3276, 2831, 3501, 2924, 3366, 3199, 3101, 3321, 3499, 2917, 2683, 2800, 2812, 3340, 3227, 3148, 3657, 4446, 1746, 1464, 1886, 2666, 3246, 3130, 3560, 3236, 2730, 3572, 1607, 3689, 2968, 1457, 1500, 909, 337, 1184, 3450, 2577, 2567, 2532, 3415, 2934, 2984, 2568, 4147, 3002, 2986, 2979, 2542, 1762, 4472, 1472, 1529, 4057, 1976, 4507, 1583, 338, 911, 1711, 340, 912, 2013, 341, 4440, 917, 344, 918, 919, 921, 922, 347, 351, 923, 924, 4498, 1518, 3728, 3637, 3570, 3429, 4091, 2870, 2995, 4338, 3205, 2880, 3261, 1994, 3968, 4291, 4204, 4071, 4034, 1742, 2820, 3912, 3287, 4145, 354, 925, 1782, 926, 927, 3610, 357, 359, 4224, 1918, 1959, 3736, 1770, 931, 4155, 364, 1279, 365, 1543, 367, 4049, 1633, 1722, 368, 369, 1495, 1566, 370, 1211, 1873, 4142, 1434, 1358, 1191, 3732, 4110, 4039, 4411, 4506, 4270, 4156, 3780, 4036, 4030, 4016, 1550, 3899, 1247, 1855, 1181, 3919, 1639, 3664, 1244, 4140, 3930, 4117, 4189, 4001, 3799, 3643, 3619, 1240, 1686, 1479, 1307, 1575, 4296, 1665, 3871, 4135, 1605, 4408, 3604, 1274, 3741, 1938, 3709, 1727, 3893, 1280, 3622, 1784, 3834, 1752, 1983, 1743, 3979, 4461, 4113, 3817, 4232, 1340, 1489, 4214, 1219, 1486, 1512, 1481, 1516, 3820, 3789, 4252, 4047, 4330, 4082, 4094, 1574, 1248, 4078, 1872, 1426, 3785, 3687, 4318, 4243, 3866, 3704, 4172, 1621, 4315, 1192, 1513, 1856, 3324, 2769, 2678, 1561, 3296, 377, 1395, 4453, 3940, 3778, 4374, 4210, 4009, 4264, 4339, 4368, 1738, 378, 1610, 4194, 4474, 4013, 4266, 1771, 3860, 3832, 1349, 1381, 3663, 1642, 1185, 4356, 3932, 1233, 4212, 3858, 1198, 4192, 3611, 1919, 1819, 3790, 3712, 1969, 4095, 1887, 4468, 1720, 4247, 2002, 1657, 1663, 1336, 3894, 1554, 1494, 1405, 3576, 4314, 3695, 1851, 4362, 1815, 3845, 4511, 3656, 3638, 1406, 1596, 4454, 1443, 1661, 1359, 1734, 3650, 1910, 1648, 3831, 4435, 1208, 1988, 4451, 1993, 1986, 3849, 1718, 4068, 1835, 1425, 1428, 1282, 4380, 1658, 1452, 1687, 4024, 379, 4072, 3791, 4491, 4323, 4014, 1304, 1440, 1511, 1981, 1676, 1547, 4422, 4450, 3990, 4029, 4097, 3890, 3796, 1389, 3711, 4344, 1578, 1476, 4343, 1202, 4413, 4384, 3808, 1647, 1475, 3892, 3674, 1739, 3926, 3595, 1943, 3756, 4405, 3973, 4109, 4159, 3744, 4387, 1960, 4275, 3781, 1535, 1210, 4492, 4365, 4118, 3655, 3886, 4278, 4383, 4485, 1392, 3751, 3931, 3986, 3678, 1249, 4353, 4208, 3710, 4238, 4213, 3969, 4436, 3175, 4128, 2970, 1228, 3534, 3437, 3406, 3641, 3639, 3954, 4335, 3995, 3582, 4475, 3784, 4470, 4010, 3802, 3941, 4427, 4396, 4348, 3587, 3818, 3864, 3956, 3863, 3731, 3814, 4067, 4354, 4350, 4334, 3821, 1932, 3929, 4171, 1258, 3824, 3631, 4465, 4494, 1320, 1398, 3828, 1204, 1223, 1284, 1685, 3773, 4209, 3014, 4462, 4246, 4190, 4312, 4023, 3760, 3753, 1178, 3884, 2783, 4038, 3545, 2916, 3112, 2834, 3880, 3673, 4102, 4399, 4048, 3752, 4207, 1235, 3943, 4355, 4087, 4100, 4327, 4037, 4163, 3918, 4486, 1243, 3933, 4178, 1662, 1643, 4152, 3634, 3617, 4445, 4303, 1370, 3838, 4199, 4284, 1213, 4382, 1399, 1187, 3714, 1828, 4487, 3615, 1842, 1501, 3746, 4018, 4420, 3606, 4121, 3724, 3935, 1941, 4419, 4282, 1955, 1949, 4310, 4488, 1577, 4127, 1288, 1171, 3670, 4052, 1860, 4124, 4508, 4500, 3652, 3972, 1309, 1630, 1528, 3717, 1217, 3692, 4430, 3764, 4316, 4285, 3645, 3971, 4421, 1172, 4026, 2740, 3125, 3546, 1725, 1206, 3842, 4404, 3690, 3962, 4513, 4340, 4329, 4410, 3703, 4136, 1763, 1487, 3589, 3907, 4153, 2707, 3730, 4426, 4180, 4041, 3923, 4444, 3851, 4429, 4361, 1441, 4394, 4302, 3758, 4510, 3742, 1868, 4077, 1710, 1939, 1335, 1997, 1975, 1701, 4280, 1613, 4006, 1984, 1351, 3653, 3833, 1593, 2561, 4442, 3900, 4298, 1761, 4388, 1820, 1597, 4317, 4249, 1341, 1680, 4441, 3628, 3725, 1945, 4206, 1588, 1439, 3794, 4447, 1838, 3776, 3658, 4064, 1377, 4011, 4272, 4503, 1367, 3594, 3680, 1300, 1750, 3913, 3774, 1877, 1987, 1862, 3998, 1380, 4185, 3686, 3696, 4463, 1350, 4008, 4230, 3853, 4244, 4083, 381, 1909, 3897, 1546, 3613, 3273, 3452, 3525, 1229, 4105, 3835, 383, 1234, 3970, 1492, 3856, 3586, 1175, 4321, 4020, 4144, 1224, 1199, 3667, 2778, 4412, 4407, 1812, 1810, 3823, 1416, 1427, 1507, 1878, 4333, 3146, 4281, 4211, 1179, 3843, 1669, 1677, 1524, 1525, 1974, 384, 1979, 1456, 1239, 4167, 3740, 1876, 1388, 1967, 1474, 385, 1342, 1508, 1580, 4060, 4378, 1576, 1212, 1893, 3921, 3585, 1174, 1396, 4061, 4015, 1207, 3698, 3825, 3922, 4021, 4181, 1598, 1916, 1429, 4502, 4231, 1321, 4390, 3693, 3734, 1382, 3684, 1747, 3806, 3896, 3635, 1768, 4025, 3976, 3840, 3963, 4286, 1502, 3836, 4161, 3659, 3743, 4130, 3605, 1385, 1783, 4392, 4328, 1316, 4173, 4265, 1246, 1985, 1629, 1829, 1737, 1837, 1914, 1839, 1834, 3984, 4495, 3910, 4160, 3671, 4184, 4132, 4250, 1503, 1237, 1523, 1417, 4063, 1562, 3977, 1971, 1707, 1847, 1792, 3769, 4074, 1534, 4239, 4003, 3915, 1689, 1776, 1599, 1265, 1655, 3874, 4261, 3626, 1791, 3579, 1644, 3936, 4054, 4260, 4359, 4131, 4297, 4357, 4022, 3770, 4046, 1222, 1996, 3788, 4169, 1925, 3953, 4228, 4226, 4277, 4101, 1889, 1369, 3797, 4088, 4019, 3771, 3632, 1402, 1520, 1767, 1466, 1194, 4137, 1908, 1927, 1758, 3772, 3661, 4186, 4174, 1170, 3850, 1315, 1611, 1530, 3596, 1461, 1848, 1173, 1928, 1459, 1765, 1826, 3719, 1931, 3584, 4004, 3591, 3967, 4168, 3957, 3878, 4165, 4191, 3980, 4058, 4200, 4336, 3958, 1260, 4051, 3798, 4032, 1774, 4322, 3991, 4106, 1641, 1570, 3978, 3965, 4464, 3813, 4154, 1365, 4257, 3846, 4345, 4379, 3603, 1693, 3937, 3801, 1787, 1214, 4483, 4201, 1898, 4245, 1347, 3867, 1900, 3640, 3916, 4089, 1209, 3745, 3988, 3975, 4236, 4075, 4146, 4256, 4308, 4000, 4148, 3588, 3868, 4403, 3883, 4326, 4393, 3895, 4237, 3955, 3727, 4005, 4092, 4372, 4283, 1553, 3805, 4151, 1281, 1681, 4489, 3982, 4437, 3597, 4342, 3872, 3987, 4490, 3876, 3668, 4300, 1679, 1242, 3598, 3583, 3647, 389, 4304, 3793, 3779, 1937, 1907, 4042, 3648, 3996, 3800, 4367, 4099, 1807, 3887, 4428, 1625, 1390, 1884, 1682, 4364, 4306, 3869, 1278, 1672, 942, 1505, 1542, 1709, 1915, 3600, 3914, 1968, 3948, 1670, 3811, 1865, 1362, 1716, 3961, 1506, 4221, 1376, 1683, 4276, 1445, 1721, 1632, 3607, 1328, 1455, 1913, 1497, 1317, 1951, 1778, 1379, 3768, 4225, 1668, 390, 391, 4406, 4341, 1480, 395, 1714, 1422, 396, 397, 3618, 4433, 1177, 3898, 398, 949, 950, 399, 951, 400, 1965, 4471, 952, 402, 2475, 403, 404, 4139, 1482, 3602, 4434, 3721, 1592, 1519, 1352, 4202, 4409, 1977, 1917, 407, 408, 1631, 1684, 409, 3889, 958, 959, 412, 960, 414, 415, 961, 1905, 416, 963, 417, 3675, 1833, 3974, 420, 421, 965, 966, 969, 970, 422, 1897, 423, 4133, 3830, 972, 424, 973, 427, 1708, 4141, 3749, 431, 1619, 975, 4044, 3590, 1944, 4126, 1923, 1706, 4400, 434, 1606, 979, 2604, 2895, 436, 3448, 1692, 983, 3862, 4055, 4358, 984, 985, 1664, 445, 1972, 2688, 4366, 3425, 3231, 3649, 2759, 2724, 3873, 3755, 1216, 3599, 3775, 2754, 2606, 3471, 3234, 2565, 2803, 2562, 2684, 3411, 3405, 2690, 1255, 3694, 3535, 1306, 4084, 3282, 1780, 987, 988, 990, 451, 452, 991, 992, 1728, 994, 995, 454, 1696, 3116, 1869, 456, 1386, 999, 3879, 2698, 1001, 461, 1447, 462, 464, 4425, 1645, 1231, 1468, 472, 473, 476, 1273, 1007, 1744, 1488, 1659, 477, 1604, 481, 4313, 482, 483, 1499, 484, 1016, 4073, 1777, 1458, 4274, 487, 1775, 4205, 1526, 1697, 1017, 2000, 489, 3917, 3616, 4311, 1800, 4473, 4085, 4401, 1310, 3783, 3765, 491, 1948, 3699, 1735, 3792, 4290, 495, 4090, 496, 2012, 1803, 3642, 1322, 498, 1021, 1022, 502, 1333, 503, 1023, 1890, 510, 1026, 3608, 1732, 511, 2397, 1864, 1816, 1531, 3636, 1699, 1027, 1029, 1366, 2112, 1261, 4027, 3478, 3763, 2959, 517, 3197, 1595, 3413, 1448, 518, 1675, 1797, 520, 1999, 3759, 1215, 4122, 1730, 524, 526, 3966, 3911, 529, 3289, 1821, 530, 531, 1874, 1038, 536, 537, 3767, 1929, 1041, 1042, 3683, 542, 1338, 4331, 4332, 4466, 2719, 3803, 4123, 4233, 1824, 3129, 3087, 3505, 4158, 4254, 1449, 3720, 4351, 4414, 1673, 3453, 3254, 1649, 546, 4240, 3580, 1046, 1047, 550, 2598, 551, 552, 3819, 1259, 4062, 2841, 1050, 3515, 4301, 1052, 1053, 3738, 1567, 1270, 3857, 1055, 1257, 1238, 3662, 561, 562, 1058, 4203, 1899, 3981, 1062, 1303, 4116, 567, 1946, 3620, 1514, 4002, 3679, 3964, 3707, 3666, 1348, 4273, 1804, 4497, 1401, 4438, 1895, 1264, 572, 1912, 3939, 4170, 4056, 1271, 1065, 1521, 1221, 1451, 1654, 3934, 4080, 4352, 1700, 3739, 1565, 1419, 1811, 3950, 1690, 1397, 3716, 1437, 1674, 4337, 1285, 4268, 1183, 3726, 3881, 4134, 4347, 4012, 3938, 4066, 4198, 4416, 4164, 3630, 4229, 4292, 4193, 4325, 4375, 4371, 4432, 4215, 1753, 3944, 1409, 4195, 1729, 4223, 1540, 1723, 1070, 3750, 3633, 4070, 4104, 4162, 4235, 1863, 4346, 1881, 1814, 1572, 4443, 3761, 1346, 1587, 1072, 3592, 576, 1891, 4469, 1275, 1950, 1963, 4129, 1296, 1551, 3733, 4111, 3993, 4108, 3949, 1287, 1713, 1736, 1995, 1435, 1424, 1830, 1705, 1861, 1197, 1254, 4120, 1545, 4417, 1469, 1785, 1236, 4293, 3839, 3983, 4395, 1957, 3928, 4295, 3715, 3855, 3609, 1990, 4076, 4175, 3927, 1757, 1650, 4299, 1773, 2004, 1267, 1364, 1462, 1879, 4007, 3729, 3665, 3722, 1691, 1624, 1751, 1394, 3924, 3952, 580, 581, 2003, 1343, 1559, 1250, 1555, 4114, 1818, 1075, 1076, 1077, 1704, 4448, 1078, 1079, 1786, 585, 3354, 1832, 3432, 2891, 2505, 1903, 1081, 1082, 4459, 1083, 1563, 590, 591, 1085, 594, 1453, 2559, 2590, 2738, 4478, 4069, 1809, 1327, 4150, 3260, 3481, 3672, 3625, 2008, 4439, 3852, 3997, 1411, 599, 3847, 1268, 4050, 3377, 4424, 1496, 4143, 4493, 3492, 1962, 600, 601, 4017, 4477, 1794, 4263, 3072, 2009, 1754, 1087, 1088, 3888, 1368, 3827, 4103, 606, 1090, 1571, 1091, 1438, 1092, 1093, 612, 1094, 3701, 4389, 613, 1603, 1332, 1715, 4369, 1652, 1096, 617, 1541, 618, 1921, 1733, 1373, 1870, 619, 4218, 1798, 1100, 1702, 1101, 1667, 1384, 623, 3700, 1788, 1600, 624, 626, 2771, 627, 1339, 3875, 628, 629, 3070, 4860, 2557, 2795, 2906, 3118, 1614, 1947, 4479, 3766, 632, 1104, 1105, 633, 1813, 636, 3706, 1110, 640, 1111, 641, 642, 1694, 3431, 2838, 3483, 3464, 3848, 2558, 3314, 3086, 3029, 2956, 3517, 2651, 2914, 2680, 2632, 3121, 3100, 3528, 3526, 3084, 4220, 3304, 2846, 1186, 3235, 2903, 3559, 2687, 3409, 3237, 2900, 2999, 3349, 3171, 2752, 3262, 3504, 3047, 4376, 3193, 3430, 2525, 2670, 2911, 3508, 2776, 2697, 3200, 2790, 3323, 2543, 2874, 2614, 3904, 3373, 3054, 2617, 4242, 3621, 2708, 4179, 4398, 3959, 3095, 1286, 3624, 4481, 1432, 3511, 2735, 4381, 3295, 1585, 1114, 1766, 3221, 2643, 2739, 3920, 644, 1116, 645, 646, 647, 1801, 4279, 3762, 1637, 1509, 1119, 2965, 2369, 2695, 3293, 650, 651, 1120, 652, 1121, 3264, 655, 658, 659, 4035, 2910, 3391, 2808, 3099, 2913, 3676, 2852, 3284, 2731, 1609, 3994, 1319, 4467, 1802, 1227, 1623, 662, 663, 664, 1124, 1125, 1128, 1129, 668, 669, 1130, 670, 1131, 1527, 1132, 671, 1772, 1135, 672, 1933, 1731, 1793, 675, 676, 3342, 1138, 1139, 677, 679, 1142, 1143, 681, 1145, 682, 685, 3822, 689, 690, 691, 1147, 1601, 3905, 694, 695, 1414, 1150, 1795, 1372, 1695, 1866, 4115, 1719, 698, 1920, 699, 700, 1544, 4305, 1636, 1393, 2010, 3810, 4452, 3677, 4227, 1277, 1400, 4402, 4157, 4197, 1337, 1253, 1532, 4028, 3989, 1493, 1854, 1902, 1510, 4182, 706, 707, 708, 4476, 1245, 714, 1841, 4234, 1314, 4096, 717, 1155, 4217, 1156, 723, 1157, 1627, 725, 1159, 1953, 1160, 1201, 727, 3787, 3747, 730, 1846, 3815, 2005, 1964, 1822, 1262, 4480, 1537, 1291, 1318, 4294, 1582, 734, 3439, 2833, 4287, 4509, 4505, 4267, 3697, 3272, 4112, 2967, 3651, 1628, 3705, 1195, 3859, 1164, 1165, 1166, 1745, 1973, 1168, 3807, 4307, 1454, or 1781.

27. The VP capsid polypeptide of any one of claims 20-24, wherein X⁶ of SEQ ID NO: 5014 is K or R.

28. The VP capsid polypeptide of claim 27, wherein the 581 to 589 region of the VP capsid polypeptide has a sequence of any one of SEQ ID NOs: 738, 4177, 1289, 740, 14, 743, 744, 17, 3477, 1548, 3051, 2982, 2877, 746, 19, 3036, 3426, 3073, 3169, 747, 3362, 2784, 21, 3192, 22, 1638, 748, 24, 749, 27, 1703, 1836, 28, 3660, 29, 750, 1640, 33, 35, 36, 1653, 1205, 3795, 753, 4288, 4219, 2770, 2962, 4241, 4107, 2718, 3317, 4391, 3263, 2553, 3947, 2710, 2608, 3467, 2796, 2961, 2529, 3320, 2674, 2635, 3446, 3053, 3250, 3688, 1998, 4320, 3351, 2655, 3514, 2779, 3194, 3319, 3224, 3281, 3708, 2807, 3562, 3274, 3374, 3013, 3416, 2981, 3065, 2777, 3469, 2977, 2638, 2972, 3059, 2574, 3380, 4262, 3167, 3368, 2781, 3547, 3386, 1225, 2960, 3485, 3370, 3443, 2824, 1467, 3327, 3178, 3006, 3252, 2991, 3470, 2888, 2572, 3418, 2642, 2519, 3363, 40, 2633, 44, 45, 756, 47, 48, 1952, 3122, 2551, 3718, 3484, 3577, 1308, 3960, 1378, 2994, 3080, 2589, 3681, 51, 760, 762, 3925, 3654, 763, 59, 60, 4086, 1740, 1660, 62, 1966, 63, 2438, 768, 66, 67, 68, 3816, 2599, 2706, 72, 73, 74, 3865, 1549, 1361, 3882, 773, 3713, 1942, 1312, 4501, 76, 1413, 775, 1560, 4289, 3757, 3593, 3908, 4397, 4415, 3723, 3754, 4360, 3945, 2854, 3523, 3669, 1356, 4065, 1294, 1484, 85, 86, 3891, 4456, 4040, 4496, 1982, 2001, 1478, 1189, 1490, 1885, 1926, 89, 780, 1180, 92, 781, 782, 783, 786, 94, 95, 788, 1831, 1867, 96, 4458, 97, 1970, 1936, 1590, 98, 99, 789, 790, 1298, 1688, 791, 792, 2007, 102, 103, 104, 105, 107, 108, 1579, 1906, 111, 798, 112, 799, 800, 1444, 801, 114, 115, 1344, 116, 802, 117, 118, 119, 121, 803, 1463, 1760, 806, 126, 128, 807, 129, 131, 808, 133, 1978, 811, 812, 135, 136, 137, 138, 814, 140, 1326, 141, 142, 143, 2344, 816, 1634, 1302, 817, 818, 147, 148, 149, 150, 151, 154, 155, 819, 820, 156, 157, 158, 161, 162, 165, 822, 168, 169, 170, 823, 172, 1651, 173, 1483, 174, 825, 176, 178, 180, 827, 181, 828, 4911, 184, 186, 188, 189, 830, 192, 193, 194, 196, 1391, 198, 199, 200, 201, 202, 203, 205, 832, 206, 834, 207, 208, 209, 210, 835, 836, 1334, 3901, 3312, 2649, 1450, 4386, 3028, 1446, 1522, 3490, 217, 219, 1612, 220, 221, 222, 839, 223, 840, 224, 225, 228, 229, 230, 231, 842, 232, 233, 234, 238, 847, 239, 850, 851, 853, 1536, 240, 241, 242, 243, 244, 245, 247, 250, 251, 254, 255, 857, 256, 258, 259, 859, 260, 861, 862, 864, 263, 2318, 865, 2326, 264, 1241, 266, 1477, 867, 268, 868, 269, 270, 869, 870, 271, 871, 872, 272, 873, 1252, 1591, 875, 274, 275, 276, 876, 877, 277, 278, 280, 1892, 1539, 881, 3601, 3877, 1460, 282, 1799, 284, 1626, 286, 1374, 1620, 1290, 1354, 887, 1956, 889, 292, 4324, 4138, 891, 296, 3903, 297, 3829, 3809, 4271, 3844, 1436, 300, 1617, 1961, 302, 304, 305, 2147, 1589, 4370, 307, 3646, 4059, 1431, 1331, 312, 1779, 313, 896, 1558, 1552, 318, 319, 322, 1958, 323, 324, 901, 1491, 328, 329, 4484, 907, 3536, 2701, 2799, 3332, 3294, 3159, 3069, 2637, 3025, 2782, 3247, 3350, 2692, 2586, 3004, 3049, 2694, 2650, 3554, 2983, 3403, 3214, 3163, 2541, 3090, 3097, 3462, 1430, 2941, 3486, 2842, 3558, 3104, 3037, 3419, 2780, 2931, 1276, 2928, 2609, 3068, 3128, 2548, 2538, 2618, 2789, 3228, 2657, 3189, 2863, 3307, 3300, 2546, 3048, 3543, 2946, 2975, 3346, 3067, 2728, 2955, 3408, 3027, 3094, 3203, 2988, 2751, 2953, 2566, 2578, 2823, 3063, 3335, 3000, 3181, 3011, 3138, 3389, 2805, 3074, 2894, 3149, 2560, 3417, 3265, 3378, 2901, 2837, 2822, 2745, 3473, 3530, 3040, 2597, 3509, 3522, 3161, 2926, 3209, 3105, 3400, 2630, 2905, 2671, 2818, 2806, 2702, 2709, 3549, 3538, 2534, 2773, 2623, 3491, 3243, 3136, 2693, 3164, 3343, 2918, 2555, 2794, 2679, 3510, 3110, 2672, 3442, 2929, 3184, 3488, 3414, 3093, 2996, 3141, 3544, 3102, 2856, 2957, 3466, 3461, 2788, 2660, 3344, 3204, 2720, 3379, 2826, 1789, 2785, 3249, 3527, 4460, 3352, 2569, 4457, 2011, 4319, 3906, 1533, 1755, 4248, 1557, 3804, 1602, 4188, 1330, 4349, 3337, 3533, 2629, 3038, 2539, 3567, 3291, 3348, 3115, 3359, 2993, 3079, 3506, 2527, 2963, 2938, 2516, 3113, 2639, 3143, 3044, 2747, 3154, 3280, 3039, 2743, 2902, 3056, 2554, 2522, 3103, 3210, 3434, 2656, 4251, 2588, 3553, 2714, 3078, 3222, 3137, 3357, 2717, 2944, 3012, 3220, 3202, 2811, 3083, 3269, 3566, 2699, 2515, 3023, 2533, 3288, 3075, 3005, 2685, 3058, 2976, 2622, 3333, 3463, 2939, 3521, 3268, 3117, 2626, 2616, 3240, 2570, 3565, 2919, 3157, 2849, 3444, 2631, 3420, 2659, 3325, 3186, 2920, 3258, 3440, 3457, 3310, 2761, 3134, 2621, 3531, 2711, 2774, 2867, 2585, 3155, 2620, 3156, 2844, 3126, 3160, 2909, 3542, 3225, 2887, 3474, 3218, 2744, 2896, 3135, 3424, 3498, 3529, 2661, 2667, 2549, 2819, 2768, 2935, 3182, 2772, 3230, 3043, 2922, 3581, 2869, 2610, 3298, 2775, 3108, 2603, 2612, 2860, 3187, 3238, 3786, 4385, 3016, 3436, 2876, 2987, 3532, 3438, 3561, 3259, 2663, 2890, 3433, 3071, 3018, 2580, 2755, 3015, 2540, 3398, 2664, 2583, 2830, 2644, 2641, 3513, 2725, 2723, 3338, 3556, 2866, 2514, 2932, 2753, 2862, 2899, 2605, 2989, 3096, 3124, 2985, 2716, 3145, 3017, 2591, 2640, 3033, 3316, 3412, 2971, 3256, 3153, 3575, 3339, 2915, 2531, 3552, 3475, 3060, 3375, 2756, 3382, 2847, 2859, 3251, 3702, 3423, 2537, 2801, 3076, 2696, 3459, 3144, 3441, 2802, 3479, 2907, 3512, 3518, 3021, 2871, 3032, 2647, 2945, 3045, 2763, 3313, 3034, 3315, 3541, 2746, 2669, 2524, 3003, 2732, 3166, 3046, 3306, 2873, 3364, 3253, 3215, 3061, 2804, 2722, 2964, 2990, 2836, 3173, 2762, 3737, 2628, 3507, 2564, 3031, 2872, 3360, 2658, 2930, 2904, 3244, 3217, 3311, 3445, 2840, 3372, 2958, 3098, 3356, 3456, 3388, 2624, 3207, 2576, 2742, 2665, 2815, 3052, 3421, 2593, 3242, 2535, 2966, 2898, 2858, 2943, 2668, 2798, 3196, 2528, 2713, 3001, 2691, 2948, 2767, 2544, 3302, 2734, 2893, 2592, 2861, 3502, 2969, 2582, 3229, 2676, 2545, 3255, 3330, 2547, 3257, 2882, 3151, 3088, 2883, 3318, 2645, 2733, 2587, 3500, 3008, 2715, 2845, 3183, 2654, 3233, 3267, 2741, 2827, 2704, 3091, 2832, 2736, 3177, 3271, 2835, 2908, 3176, 2947, 3292, 3191, 2517, 3026, 3082, 3392, 2584, 2712, 3213, 3451, 2634, 3150, 2810, 3303, 2573, 3460, 2615, 3394, 2828, 3329, 4377, 4499, 3555, 2974, 3629, 3578, 3885, 2817, 3248, 2954, 3334, 3571, 3345, 3551, 3384, 3422, 2530, 2973, 4418, 4081, 3951, 1764, 1671, 1843, 3449, 3185, 3399, 2786, 3055, 3472, 3397, 2601, 3564, 3277, 3548, 3179, 3407, 3841, 3347, 3142, 3241, 3077, 2700, 3147, 2648, 3283, 2829, 3278, 2581, 2536, 4363, 2848, 3410, 2797, 2523, 2520, 2721, 3496, 2571, 3198, 3219, 3030, 2673, 2921, 3301, 3322, 2705, 3239, 2949, 3369, 3396, 2892, 2897, 2766, 3174, 3297, 2550, 2889, 2933, 2793, 2627, 2677, 3119, 2596, 3226, 3172, 3089, 2868, 2839, 3120, 3286, 2843, 3465, 3946, 2682, 2865, 3539, 3168, 2864, 3308, 3557, 2940, 3109, 3503, 2625, 3455, 3114, 2595, 3331, 2978, 2518, 2521, 4079, 3024, 3573, 2952, 2653, 3180, 2813, 2652, 2600, 2816, 3201, 3188, 3270, 2997, 2992, 3009, 3520, 2936, 3275, 3165, 3447, 3131, 3305, 2809, 2792, 2729, 2814, 2619, 3266, 2825, 3066, 2857, 2998, 3064, 2681, 3035, 3279, 2764, 3480, 3127, 2912, 3010, 2607, 3211, 3111, 3041, 4269, 3487, 3489, 3019, 1266, 1415, 2980, 3428, 3435, 3482, 3020, 2748, 2646, 2787, 2760, 2563, 3085, 3133, 3158, 3170, 2703, 3494, 2556, 2552, 3395, 3245, 3404, 2675, 2791, 1911, 908, 1935, 2749, 3341, 3355, 2575, 2942, 2886, 2758, 2594, 3495, 2884, 3516, 3042, 2737, 2923, 3563, 2855, 3476, 2611, 2937, 3383, 3497, 3402, 3162, 2662, 2875, 3223, 2878, 1808, 3285, 2757, 3057, 2951, 3519, 2579, 2853, 3387, 3401, 3493, 3393, 1608, 3365, 2885, 3574, 3081, 3007, 3568, 3152, 3367, 3358, 336, 3468, 3290, 3550, 3132, 2726, 2879, 3190, 3309, 2613, 2765, 3106, 1355, 3454, 2851, 2881, 3232, 3458, 3326, 3353, 2927, 3212, 2950, 3376, 3208, 3062, 3612, 3195, 3385, 2686, 2602, 3569, 3123, 2727, 1622, 2821, 2636, 2750, 2850, 3050, 2925, 3336, 3540, 2689, 3139, 2526, 3361, 3022, 3427, 3107, 3140, 3371, 3276, 2831, 3501, 2924, 3366, 3199, 3101, 3321, 3499, 2917, 2683, 2800, 2812, 3340, 3227, 3148, 3657, 4446, 1464, 1886, 2666, 3246, 3130, 3560, 3236, 2730, 3572, 3689, 2968, 1457, 3450, 2577, 2567, 2532, 3415, 2934, 2984, 2568, 4147, 3002, 2986, 910, 2979, 2542, 1762, 4472, 1529, 4057, 1976, 4507, 1583, 1711, 2013, 1594, 4440, 344, 920, 921, 4498, 3728, 3637, 3570, 3429, 4091, 2870, 2995, 4338, 3205, 2880, 3261, 3968, 4291, 4204, 4071, 4034, 1742, 2820, 3912, 3287, 1218, 1190, 4145, 354, 1782, 927, 3610, 356, 4224, 1918, 1959, 1840, 3736, 1770, 929, 930, 931, 4155, 360, 361, 362, 364, 1279, 365, 1543, 366, 367, 4049, 1633, 1722, 369, 1495, 1566, 373, 1211, 1726, 1442, 1748, 4142, 1434, 1358, 1191, 3732, 4110, 4039, 4506, 4156, 4036, 4030, 4016, 3899, 1247, 1855, 3919, 1244, 4140, 3930, 4117, 4189, 4001, 3643, 3619, 1240, 1575, 3871, 4135, 4408, 3604, 1274, 4149, 3741, 1938, 3709, 3622, 3834, 1983, 1743, 3979, 4461, 4113, 3817, 4232, 4214, 3902, 1219, 1486, 1512, 1516, 4047, 4082, 4094, 1574, 1248, 4078, 1872, 1426, 3687, 4318, 4243, 3866, 3704, 4172, 1856, 3324, 2769, 2678, 1561, 3296, 377, 1395, 1584, 4093, 4453, 4210, 4009, 4264, 4339, 1738, 4474, 4013, 4266, 1771, 1759, 1922, 3860, 3832, 1349, 1381, 3663, 1185, 3932, 3858, 1198, 4192, 3611, 1919, 3790, 3712, 4095, 1887, 4468, 1720, 4247, 934, 1790, 2002, 1657, 1336, 3894, 3576, 4314, 3695, 1850, 4362, 1815, 3638, 4454, 1661, 4504, 1359, 3650, 1305, 1648, 3831, 4435, 4451, 1993, 3849, 1718, 4068, 1835, 1425, 1428, 4380, 1658, 1452, 4024, 4072, 3791, 4491, 4323, 4014, 1304, 1511, 1981, 1676, 4422, 1283, 3861, 3644, 4259, 1418, 1176, 4216, 1421, 3992, 4423, 4253, 3748, 4119, 1297, 1954, 4450, 3711, 4344, 1578, 4384, 3892, 3674, 3595, 4405, 3973, 4109, 4159, 3744, 4387, 4275, 4492, 4365, 4118, 4278, 3751, 3678, 4353, 3175, 2970, 1228, 3534, 3437, 3406, 3641, 4470, 3941, 4348, 3587, 3818, 4350, 3821, 3929, 3824, 4465, 1398, 3828, 1284, 3773, 4209, 3014, 3884, 2783, 4038, 3545, 2916, 3112, 2834, 3880, 4399, 4048, 3752, 4207, 1235, 3943, 4355, 4087, 4100, 4163, 4486, 4178, 1643, 4152, 4445, 4303, 4284, 1213, 4382, 1399, 3714, 4487, 3615, 4018, 4420, 4121, 3724, 4282, 4310, 4488, 4127, 3670, 4052, 3627, 3777, 1371, 3685, 4258, 3812, 1581, 4124, 4508, 4500, 3652, 3972, 1528, 3717, 2740, 3125, 3546, 3842, 4404, 3690, 3962, 4136, 3589, 3907, 4153, 2707, 4180, 3923, 4444, 4361, 4394, 3758, 4510, 3742, 1710, 1407, 4187, 1193, 1188, 1196, 1724, 1717, 1200, 1997, 1701, 4280, 4006, 1984, 3833, 2561, 4442, 3900, 4298, 1761, 4388, 1597, 4317, 4249, 1341, 1203, 1680, 4441, 3628, 3725, 1945, 937, 4206, 1588, 1439, 3794, 4447, 3776, 3658, 4064, 4011, 4272, 4503, 1324, 3594, 3680, 1300, 1750, 3913, 3774, 1877, 1987, 3998, 3686, 3696, 4463, 3853, 4244, 4083, 1909, 3897, 1546, 3613, 3273, 3452, 3525, 1229, 3835, 1234, 3970, 3856, 3586, 1175, 4321, 2778, 4412, 4407, 3823, 1427, 1507, 1878, 4333, 3146, 4281, 4211, 3843, 1677, 1524, 1525, 1974, 1239, 4167, 3740, 1342, 1471, 4176, 1232, 1989, 4125, 1741, 1580, 4060, 1576, 1212, 3921, 1174, 4061, 4021, 3693, 3734, 1382, 3684, 3806, 3635, 3976, 3840, 4286, 3836, 4161, 3659, 3605, 4392, 4328, 1316, 4173, 4265, 1246, 1629, 1829, 3826, 1992, 1656, 1914, 1839, 3984, 3910, 4160, 4184, 4132, 4250, 1792, 3769, 1534, 4003, 1689, 1599, 1265, 1410, 1823, 1498, 1329, 386, 940, 1655, 3874, 4261, 3626, 3579, 1644, 3936, 4054, 4260, 4297, 4357, 4022, 4046, 1222, 1996, 3788, 3953, 4226, 4277, 4101, 3797, 4019, 3771, 3632, 1402, 4137, 3772, 3661, 4186, 4174, 1170, 3850, 1315, 1611, 1859, 4183, 1403, 4033, 3623, 3596, 1461, 1848, 1173, 1928, 1765, 3719, 3584, 4165, 4191, 3980, 4058, 4200, 4336, 3958, 1260, 4051, 3798, 4032, 1774, 4322, 3991, 4106, 3978, 3965, 4464, 3813, 4154, 1365, 3846, 4345, 4379, 3603, 3937, 3801, 1787, 1214, 4483, 4201, 1845, 1220, 4245, 1347, 3867, 1900, 3640, 3916, 4089, 3745, 3975, 4256, 4308, 4000, 3868, 4403, 3883, 4326, 4393, 3895, 4237, 3955, 4005, 4092, 4372, 4283, 3805, 4151, 3982, 3597, 3872, 3987, 4490, 3876, 3668, 4300, 1679, 1242, 3598, 3583, 3647, 4304, 3779, 1907, 4042, 3648, 3996, 3800, 4367, 4099, 1807, 3887, 4428, 1625, 1390, 1884, 1682, 4364, 4306, 3869, 1278, 942, 1505, 1709, 3600, 3914, 3948, 1865, 1716, 3961, 1506, 4221, 1376, 1683, 4276, 1721, 1632, 3607, 1455, 1913, 1497, 1317, 1951, 1778, 3768, 4225, 1668, 390, 4406, 4341, 1480, 1714, 1422, 397, 3618, 4433, 1177, 3898, 398, 950, 400, 1965, 4471, 953, 401, 403, 955, 1482, 3602, 4434, 3721, 1592, 1825, 1698, 1519, 1352, 4409, 1977, 405, 1631, 1684, 409, 3889, 2117, 411, 413, 414, 415, 961, 1905, 416, 963, 3675, 1833, 3974, 965, 970, 1897, 1272, 4133, 3830, 972, 424, 427, 1708, 4141, 3749, 1619, 975, 4044, 3590, 1944, 4126, 1923, 1706, 432, 976, 978, 4400, 1606, 980, 2604, 2895, 436, 3448, 2188, 438, 1692, 442, 3862, 4055, 4358, 2276, 985, 1664, 443, 4309, 4045, 3854, 3682, 1972, 2688, 4366, 3425, 3231, 3649, 2759, 2724, 3755, 1216, 3599, 3775, 2754, 2606, 3471, 3234, 2565, 2803, 2562, 2684, 3411, 3405, 2690, 1255, 3694, 3985, 3535, 1306, 4084, 3282, 1780, 448, 990, 991, 1485, 992, 1728, 993, 994, 1696, 997, 3116, 1869, 456, 1386, 1000, 3879, 2698, 460, 1001, 461, 1447, 1002, 1003, 463, 464, 4425, 465, 1004, 466, 469, 1231, 1468, 470, 1005, 476, 1273, 1744, 1488, 1659, 1604, 479, 1013, 1014, 481, 4313, 1499, 1016, 4073, 1777, 485, 4274, 487, 1775, 4205, 1526, 1697, 2000, 488, 1894, 1882, 1817, 1880, 490, 1018, 3917, 3616, 4311, 4473, 4085, 4401, 3783, 3765, 1538, 3870, 491, 3699, 3792, 4290, 494, 2421, 4090, 2012, 1803, 3642, 1322, 1020, 502, 1333, 504, 1890, 507, 3608, 1732, 1864, 1816, 1531, 513, 3636, 514, 1699, 1027, 1366, 4950, 4027, 3478, 2959, 1293, 3197, 1595, 3413, 518, 1032, 1033, 1675, 1797, 2315, 521, 1999, 3759, 1215, 4122, 1730, 3966, 1035, 4973, 528, 3911, 3289, 1821, 530, 532, 1874, 533, 1038, 538, 539, 3767, 1929, 3683, 1338, 1616, 1901, 1796, 1517, 4331, 4332, 4466, 2719, 4123, 4233, 1824, 3129, 3087, 3505, 4158, 4254, 3720, 4351, 4414, 3453, 3254, 1649, 544, 4240, 3580, 1046, 548, 549, 2598, 552, 553, 3819, 1259, 4062, 554, 2841, 3515, 1433, 1323, 4301, 555, 558, 3738, 1567, 559, 1054, 1270, 3857, 2175, 1257, 1238, 3662, 561, 1058, 563, 1061, 4203, 1899, 3981, 1062, 1303, 4116, 1946, 3620, 1514, 4002, 3679, 3964, 3707, 3666, 1348, 4273, 1804, 4497, 1401, 4438, 1895, 1264, 1912, 573, 3939, 4170, 4056, 1271, 1521, 1221, 1451, 3934, 4080, 4352, 1700, 3739, 1419, 1811, 3950, 1690, 3716, 1569, 1437, 1674, 4337, 1285, 4268, 1183, 3881, 3938, 4198, 4416, 4229, 4292, 4193, 4325, 4375, 4432, 4215, 3944, 4195, 4223, 1540, 4455, 4512, 1723, 3750, 4070, 4104, 4235, 1863, 4346, 1881, 1814, 4443, 3761, 1587, 3592, 576, 4469, 1275, 1950, 4129, 1296, 1551, 3733, 4111, 3993, 4108, 1287, 1713, 1556, 1736, 1995, 1705, 1861, 4120, 4417, 1785, 1236, 4293, 1827, 3839, 3983, 4395, 1957, 3928, 4295, 3715, 3855, 3609, 4076, 4175, 3927, 1757, 4299, 1773, 1364, 1462, 4007, 3729, 3665, 3722, 1691, 1712, 1624, 1751, 1394, 3924, 3952, 581, 2003, 1559, 1250, 1555, 4114, 1818, 1076, 4448, 1078, 1786, 3354, 1832, 3432, 2891, 1903, 4459, 589, 1563, 1084, 591, 592, 594, 595, 1858, 596, 1453, 2559, 2590, 2738, 4478, 4069, 1809, 1327, 4150, 3260, 3481, 3672, 3625, 4439, 3852, 3997, 3847, 4050, 3377, 4424, 4143, 4493, 3492, 1412, 4017, 4477, 1794, 602, 4263, 3072, 2009, 1754, 3888, 603, 604, 1368, 3827, 4103, 1571, 1438, 611, 1093, 612, 1094, 3701, 4389, 614, 615, 1332, 1715, 4369, 1652, 1541, 1921, 1733, 1373, 1870, 619, 4218, 1798, 1702, 1384, 3700, 1788, 1600, 624, 2473, 1423, 2771, 1339, 3875, 3070, 2015, 2557, 2795, 2906, 2103, 3299, 3118, 4576, 1103, 1614, 1947, 631, 4479, 3766, 1107, 635, 1813, 636, 2431, 637, 1109, 639, 3706, 1110, 640, 642, 3735, 3390, 1694, 3431, 2838, 3483, 3464, 3848, 2558, 3314, 3086, 3029, 2956, 3517, 2651, 2914, 2680, 2632, 3121, 3100, 3528, 3526, 3084, 4220, 3304, 2846, 1186, 3235, 2903, 3559, 2687, 3409, 3237, 2900, 2999, 3349, 3171, 2752, 3262, 3504, 3047, 3193, 3430, 2525, 2670, 2911, 3508, 2776, 2697, 3200, 2790, 3323, 2543, 2874, 2614, 3904, 3373, 3054, 2617, 4242, 3621, 2708, 4179, 4398, 3959, 1269, 3095, 1286, 3624, 4481, 3511, 2735, 4381, 3295, 1568, 1766, 3221, 2643, 2739, 3920, 647, 1801, 4279, 3762, 1637, 1509, 648, 1117, 1119, 2965, 2695, 3293, 4722, 1121, 653, 1122, 3264, 655, 656, 657, 4035, 2910, 3391, 2808, 3099, 2913, 3676, 2852, 3284, 2731, 3537, 3994, 1319, 4467, 1623, 660, 1123, 664, 1126, 1128, 1129, 1130, 670, 1527, 671, 1772, 1137, 5005, 1933, 1731, 1793, 3342, 1140, 1141, 687, 3822, 1601, 1148, 693, 3905, 694, 1414, 1149, 697, 1795, 1372, 1695, 1866, 1151, 4115, 1719, 1920, 4999, 1544, 703, 4031, 4305, 1636, 3810, 4452, 3677, 4227, 4402, 4157, 4197, 1337, 1253, 4028, 3989, 704, 1493, 1902, 1152, 4182, 707, 708, 709, 4476, 1375, 713, 714, 1841, 4234, 1154, 1314, 4096, 718, 719, 720, 2063, 1311, 721, 4217, 1627, 1158, 1953, 1201, 3787, 729, 3747, 730, 1846, 3815, 1964, 1822, 1262, 4480, 1537, 1291, 1318, 4294, 1582, 3439, 2833, 4287, 4509, 4505, 4267, 3697, 3272, 4112, 2967, 3651, 1805, 3705, 1195, 3859, 1164, 1165, 2351, 2423, 1745, 1973, 3807, 4307, 1169, 1454, or 1781.

29. The VP capsid polypeptide of any one of claims 1-28, wherein:
(a) X³ of SEQ ID NO: 5014 is not D,
(b) X⁶ of SEQ ID NO: 5014 is not D, or
(c) X³ of SEQ ID NO: 5014 is not D and X⁶ of SEQ ID NO: 5014 is not D.

30. The VP capsid polypeptide of claim 29, wherein the 581 to 589 region of the VP capsid polypeptide has a sequence of any one of SEQ ID NOs: 738, 739, 4177, 1289, 740, 14, 15, 741, 742, 743, 16, 744, 17, 18, 745, 3477, 1548, 3051, 2982, 2171, 2877, 746, 19, 20, 3036, 3426, 3073, 3169, 747, 2406, 3362, 2784, 2469, 4889, 21, 3192, 4942, 22, 23, 1638, 748, 24, 25, 749, 26, 27, 1703, 1836, 28, 2038, 2301, 3660, 29, 750, 30, 31, 32, 2095, 1640, 33, 34, 35, 36, 37, 4742, 2450, 38, 4925, 39, 751, 752, 2144, 1653, 1205, 3795, 753, 4288, 4219, 2770, 2962, 4241, 4107, 2718, 3317, 4391, 4053, 3263, 2553, 3947, 2710, 2608, 3467, 2796, 2961, 2529, 3320, 2674, 2635, 3446, 3053, 3250, 3688, 1182, 1998, 4320, 3351, 2655, 3514, 2779, 3194, 3319, 3224, 3281, 3708, 2807, 3562, 3274, 3374, 3013, 3416, 2981, 3065, 2777, 3469, 2977, 2638, 2972, 3059, 2574, 3380, 4262, 3167, 3368, 2781, 3547, 3386, 1225, 2960, 3485, 3370, 3443, 2824, 754, 1467, 3327, 3178, 3006, 3252, 2991, 3470, 2888, 2572, 3418, 2642, 2519, 3363, 40, 2633, 41, 42, 43, 755, 2511, 44, 45, 756, 46, 757, 47, 48, 1952, 758, 2341, 2410, 49, 3122, 2551, 3718, 4806, 2216, 3484, 3577, 759, 2080, 2072, 2034, 50, 1308, 1230, 3960, 1378, 2994, 3080, 2589, 3681, 51, 2167, 52, 760, 53, 2389, 4755, 761, 4591, 762, 4659, 54, 2146, 3925, 55, 3654, 2087, 2346, 4766, 4682, 4984, 4744, 56, 763, 764, 4626, 4702, 57, 58, 59, 60, 61, 4086, 1740, 1660, 765, 766, 62, 1966, 2032, 2499, 2332, 767, 63, 2096, 2181, 4913, 2438, 2041, 64, 768, 769, 770, 2384, 2402, 771, 65, 66, 2111, 67, 772, 2458, 2197, 68, 3816, 69, 2599, 2706, 2497, 70, 2399, 71, 4769, 2366, 72, 73, 74, 3865, 1549, 1361, 2453, 3882, 773, 3713, 1942, 2140, 75, 1312, 4501, 76, 77, 774, 1413, 775, 776, 78, 1560, 4289, 3757, 79, 3593, 4043, 1806, 3908, 4397, 1615, 4415, 3723, 2006, 3754, 1470, 4360, 80, 3945, 2854, 3523, 3669, 1356, 777, 2379, 81, 82, 4065, 83, 84, 2030, 1294, 2413, 2064, 1484, 2299, 85, 4594, 86, 778, 87, 3891, 4456, 4040, 4496, 1982, 2001, 1478, 1189, 88, 1490, 1885, 1926, 89, 90, 91, 779, 2270, 780, 2161, 1180, 92, 781, 782, 783, 93, 2356, 784, 785, 786, 94, 95, 788, 1831, 1867, 96, 4458, 97, 1970, 4656, 2173, 1936, 2349, 1590, 98, 99, 100, 789, 790, 1298, 101, 1688, 791, 792, 2007, 4556, 2070, 102, 793, 4632, 103, 794, 795, 104, 105, 106, 2229, 796, 4980, 4691, 107, 2440, 1849, 108, 2014, 797, 4736, 2509, 2018, 2227, 4787, 1579, 110, 1906, 111, 2428, 798, 2075, 112, 2411, 113, 2359, 799, 4848, 800, 2461, 1444, 2313, 2350, 4579, 4821, 801, 114, 2329, 4864, 4834, 115, 1344, 116, 802, 117, 118, 119, 4929, 4677, 120, 4791, 2158, 121, 803, 804, 1463, 805, 122, 2139, 2290, 1760, 2465, 123, 2424, 2058, 2230, 124, 4717, 806, 125, 126, 2370, 127, 4521, 128, 4971, 4994, 807, 2085, 4533, 129, 130, 131, 132, 4933, 808, 2336, 2026, 2204, 809, 810, 2281, 133, 1978, 134, 811, 812, 135, 136, 137, 138, 813, 814, 139, 4673, 140, 815, 1326, 141, 142, 143, 2344, 4544, 5009, 144, 145, 816, 4654, 2125, 4663, 4810, 4816, 1634, 1302, 817, 146, 818, 147, 148, 149, 4546, 150, 151, 152, 153, 154, 155, 819, 820, 156, 2149, 157, 2295, 821, 158, 159, 160, 161, 4631, 2441, 162, 163, 164, 165, 166, 822, 167, 168, 169, 170, 171, 823, 172, 4613, 824, 1651, 173, 1483, 174, 175, 825, 176, 177, 178, 179, 4624, 2170, 4809, 4520, 180, 826, 827, 181, 828, 4695, 2130, 4911, 182, 4582, 4873, 2189, 183, 4641, 829, 184, 185, 2244, 4647, 186, 187, 188, 189, 190, 2114, 830, 191, 192, 193, 194, 2071, 4615, 2361, 195, 4852, 2187, 4914, 4947, 196, 1391, 197, 4534, 4726, 4788, 198, 199, 831, 2240, 2223, 200, 201, 202, 203, 2106, 2503, 4775, 204, 205, 832, 833, 206, 834, 2232, 2294, 207, 2166, 208, 209, 210, 835, 836, 1334, 837, 3901, 3312, 2649, 1301, 211, 212, 1450, 4386, 3028, 213, 1446, 214, 2206, 215, 1896, 1522, 3490, 838, 216, 2090, 2241, 217, 218, 4653, 219, 1612, 220, 221, 222, 839, 223, 4974, 4790, 4915, 2464, 4567, 4774, 4964, 2360, 840, 224, 4928, 4741, 225, 2088, 4751, 226, 227, 4890, 4519, 4883, 228, 4786, 229, 230, 231, 2393, 2448, 841, 842, 232, 233, 4782, 234, 2269, 843, 235, 844, 236, 237, 4930, 845, 846, 238, 847, 239, 848, 849, 2150, 850, 851, 852, 853, 1536, 240, 854, 241, 242, 243, 244, 245, 246, 247, 248, 4696, 855, 4634, 856, 249, 250, 251, 252, 253, 254, 255, 857, 2115, 4880, 2218, 256, 257, 258, 259, 858, 859, 260, 261, 860, 861, 862, 262, 4966, 863, 864, 263, 4749, 4970, 2296, 2318, 4535, 865, 2326, 264, 1241, 265, 266, 866, 1477, 267, 867, 4977, 268, 868, 269, 4668, 5002, 270, 869, 870, 271, 871, 872, 272, 4822, 4709, 873, 4655, 4972, 2392, 2317, 874, 1252, 273, 1591, 4975, 875, 274, 2025, 275, 1980, 276, 876, 877, 2066, 277, 278, 279, 4670, 280, 2323, 2288, 2334, 4939, 4689, 281, 878, 2416, 1892, 879, 1539, 2214, 2215, 880, 2327, 881, 882, 4601, 883, 1295, 3601, 3877, 1930, 1420, 1678, 1460, 2306, 884, 282, 1799, 283, 284, 4988, 4871, 4553, 4772, 4817, 2260, 1626, 2082, 885, 286, 1374, 886, 2119, 2504, 2468, 287, 1620, 1290, 2425, 2482, 4564, 4671, 2282, 288, 2354, 1354, 2033, 289, 887, 290, 888, 291, 1956, 2362, 2467, 889, 2357, 4547, 4765, 292, 4794, 2391, 4324, 293, 890, 294, 295, 4138, 891, 2297, 2254, 296, 2224, 3903, 297, 892, 3829, 298, 299, 3809, 4271, 3844, 1436, 300, 1515, 1617, 301, 1961, 4649, 5010, 302, 2060, 303, 304, 305, 2452, 2147, 4574, 4538, 306, 2293, 1589, 893, 4946, 4370, 4841, 2342, 307, 308, 309, 894, 2246, 2155, 3646, 4059, 1431, 1331, 310, 311, 4948, 312, 895, 1779, 313, 314, 315, 316, 896, 1558, 1552, 317, 2312, 318, 319, 897, 320, 898, 321, 322, 899, 1958, 2022, 2016, 900, 2454, 323, 2427, 2134, 324, 901, 325, 902, 326, 2373, 4803, 2459, 1491, 327, 328, 903, 2463, 2264, 329, 330, 904, 1635, 4820, 905, 2506, 331, 4706, 4484, 1756, 906, 907, 4661, 2179, 4584, 4609, 332, 4907, 4635, 4529, 4683, 4523, 4561, 333, 3536, 2701, 2799, 3332, 3294, 3159, 3069, 2637, 3025, 2782, 3247, 3350, 2692, 2586, 3004, 3049, 2694, 2650, 3554, 2983, 3403, 3214, 3163, 2541, 3090, 3097, 3462, 1430, 2941, 3486, 2842, 3558, 3104, 3037, 3419, 2780, 2931, 1276, 2928, 2609, 3068, 3128, 2548, 2538, 2618, 2789, 3228, 2657, 3189, 2128, 2863, 3307, 3300, 2546, 3048, 3543, 2946, 2975, 3346, 3067, 2728, 2955, 3408, 3027, 3094, 3203, 2988, 2751, 2953, 2566, 2578, 2823, 3063, 3335, 3000, 3181, 3011, 3138, 3389, 2805, 3074, 2894, 3149, 2560, 3417, 3265, 3378, 2901, 2837, 2822, 2745, 3473, 3530, 3040, 2597, 3509, 3522, 3161, 2926, 3209, 3105, 3400, 2630, 2905, 2671, 2818, 2806, 2702, 2709, 2400, 3549, 3538, 2534, 2773, 2623, 3491, 3243, 3136, 2693, 3164, 3343, 2918, 2555, 2794, 2679, 3510, 3110, 2672, 3442, 2929, 3184, 3488, 2135, 4763, 3414, 3093, 2996, 3141, 3544, 3102, 2856, 2957, 3466, 3461, 2788, 2660, 3344, 3204, 2720, 3379, 2826, 1789, 2396, 2785, 3249, 3527, 4460, 3352, 2051, 2569, 4457, 2011, 4857, 2163, 4319, 3906, 1533, 1755, 1888, 4248, 1557, 2153, 3804, 1363, 1934, 1602, 1404, 4188, 1330, 4349, 3337, 3533, 2629, 3038, 2539, 3567, 3291, 3348, 3115, 3359, 2993, 3079, 3506, 2527, 2963, 2938, 2516, 3113, 1345, 2639, 3143, 3044, 2747, 3154, 3280, 3039, 2743, 2902, 3056, 2554, 2522, 3103, 3210, 3434, 2656, 4251, 4166, 4196, 3206, 3328, 2588, 3553, 2714, 3078, 3222, 3137, 3357, 2717, 2944, 3012, 3220, 3202, 2811, 3083, 3269, 3566, 2699, 2515, 3023, 2533, 3288, 3075, 3005, 2685, 3058, 2976, 2622, 3333, 3463, 2939, 3521, 3268, 3117, 2626, 2616, 3240, 2570, 3565, 2919, 3157, 2849, 3444, 2631, 3420, 2659, 3325, 3186, 2920, 3258, 3440, 3457, 3310, 2761, 3134, 2621, 3531, 2711, 2774, 2867, 2585, 3155, 2620, 3156, 2844, 3126, 3160, 2909, 3542, 3225, 2887, 3474, 3218, 2744, 2896, 3135, 3424, 3498, 3529, 2661, 2667, 2549, 2819, 2768, 2935, 3182, 2772, 3230, 3043, 2922, 3581, 3524, 2869, 2610, 3298, 2775, 3108, 2603, 3614, 2612, 2860, 3187, 3238, 3786, 4385, 3016, 3436, 2876, 2987, 3532, 3438, 3561, 3259, 2663, 2890, 3433, 3071, 3018, 2580, 2755, 3015, 2540, 3398, 2664, 2583, 2830, 2644, 2641, 3513, 2725, 2723, 3338, 3556, 2866, 2514, 2932, 2753, 2862, 2899, 2605, 2989, 3096, 3124, 2985, 2716, 3145, 3017, 2591, 2640, 3033, 1853, 3216, 3316, 3412, 2971, 3256, 3153, 3575, 3339, 2915, 2531, 3552, 3475, 3060, 3375, 2756, 3382, 2847, 2859, 3251, 3702, 3423, 2537, 2801, 3076, 2696, 3092, 3459, 3144, 3441, 2802, 3479, 2907, 3512, 3518, 3021, 2871, 3032, 2647, 2945, 3045, 2763, 3313, 3034, 3315, 3541, 2746, 2669, 2524, 3003, 2732, 3166, 3046, 3306, 2873, 3364, 3253, 3215, 3061, 2804, 2722, 2964, 2990, 2836, 4098, 4449, 3173, 2762, 3737, 2628, 3507, 2564, 3031, 2872, 3360, 2658, 2930, 2904, 3244, 3217, 3311, 3445, 2840, 3372, 2958, 3098, 3356, 3456, 3388, 2624, 3207, 2576, 2742, 2665, 2815, 3052, 3421, 2593, 3242, 2535, 2966, 2898, 2858, 2943, 2668, 2798, 3196, 2528, 2713, 3001, 2691, 2948, 2767, 2544, 3302, 2734, 2893, 2592, 2861, 3502, 2969, 2582, 3229, 2676, 2545, 3255, 3330, 2547, 3257, 2882, 3151, 3088, 2883, 3318, 2645, 2733, 2587, 3500, 3008, 2715, 2845, 3183, 2654, 3233, 3267, 2741, 2827, 2704, 3091, 2832, 2736, 3177, 3271, 2835, 2908, 3176, 2947, 3292, 3191, 2517, 3026, 3082, 3392, 3381, 2584, 2712, 3213, 3451, 2634, 3150, 2810, 3303, 2573, 3460, 2615, 3394, 2828, 3329, 4377, 4499, 3555, 2974, 3782, 3629, 3578, 3885, 2817, 3248, 2954, 3334, 3571, 3345, 3551, 3384, 3422, 1357, 1844, 2530, 2973, 4418, 4081, 3951, 1764, 1671, 1852, 334, 1843, 3449, 3185, 3399, 2786, 3055, 3472, 3397, 2601, 3564, 3277, 4373, 3548, 3179, 3407, 3841, 3347, 3142, 4255, 4431, 3241, 3077, 2700, 3147, 2648, 3283, 2829, 3278, 2581, 2536, 4363, 2848, 3410, 2797, 2523, 2520, 2721, 3496, 2571, 3198, 3219, 3030, 2673, 2921, 3837, 3301, 3322, 2705, 3239, 2949, 3369, 3396, 2892, 2897, 2766, 3174, 3297, 2550, 2889, 2933, 2793, 2627, 2677, 3119, 2596, 3226, 3172, 3089, 2868, 2839, 3942, 3120, 3286, 2843, 3465, 1564, 3946, 4222, 1504, 3999, 2682, 1875, 2865, 3539, 3168, 2864, 3308, 3557, 2940, 3109, 3503, 2625, 3455, 3114, 2595, 3331, 2978, 2518, 2521, 4079, 3024, 3573, 2952, 2653, 1769, 3180, 2813, 2652, 2600, 2816, 3201, 3188, 3270, 2997, 2992, 3009, 3520, 2936, 3275, 3165, 3447, 3131, 3305, 2809, 2792, 2729, 2814, 2619, 3266, 2825, 3066, 2857, 2998, 3064, 2681, 3035, 3279, 2764, 3480, 3127, 2912, 3010, 2607, 3211, 3111, 3041, 1573, 3909, 4269, 3487, 3489, 3019, 335, 1266, 1415, 2980, 3428, 3435, 3482, 3020, 2748, 2646, 2787, 2760, 2563, 3085, 3133, 3158, 3170, 2703, 3494, 2556, 2552, 3395, 3245, 3404, 2675, 2791, 2252, 4845, 1911, 4856, 2363, 908, 1935, 4711, 4728, 2460, 2749, 3341, 3355, 2575, 2942, 2886, 2758, 2594, 3495, 2884, 3516, 3042, 2737, 2923, 3563, 2855, 3476, 2611, 2937, 3383, 3497, 3402, 3162, 2662, 2875, 3223, 2878, 2079, 1808, 3285, 2757, 3057, 2951, 3519, 2579, 2853, 3387, 3401, 3493, 3393, 1608, 3365, 2885, 3574, 3081, 3007, 3568, 3152, 3367, 3358, 336, 2268, 3468, 3290, 3550, 3132, 2726, 2879, 3190, 3309, 2613, 2765, 3106, 1355, 3454, 2851, 2881, 3232, 3458, 3326, 3353, 2927, 3212, 2950, 3376, 3208, 3062, 3612, 3195, 3385, 2686, 2602, 3569, 3123, 2727, 1622, 2821, 2636, 2750, 2850, 3050, 2925, 3336, 3540, 2689, 3139, 2526, 3361, 3022, 3427, 3107, 3140, 3371, 3276, 2831, 3501, 2924, 3366, 3199, 3101, 3321, 3499, 2917, 2683, 2800, 2812, 3340, 3227, 3148, 3657, 4446, 1746, 1464, 1886, 2666, 3246, 3130, 3560, 3236, 2730, 3572, 1607, 3689, 2968, 1457, 1500, 909, 337, 1184, 3450, 2577, 2567, 2532, 3415, 2934, 2984, 2568, 4147, 4943, 3002, 2986, 910, 2979, 2542, 2338, 2331, 2492, 1762, 4472, 1472, 1529, 2319, 2131, 4057, 4937, 2048, 4887, 1976, 4507, 1583, 338, 2078, 2372, 2102, 339, 911, 1711, 340, 912, 2013, 913, 2277, 914, 2403, 341, 915, 4672, 4902, 916, 342, 1594, 4440, 917, 343, 344, 4559, 918, 2439, 919, 345, 920, 346, 921, 922, 347, 2226, 348, 2180, 2298, 349, 350, 2099, 2036, 351, 4808, 923, 924, 4498, 1518, 3728, 3637, 3570, 3429, 4091, 2870, 2995, 4338, 3205, 2880, 3261, 1994, 3968, 4291, 4204, 4071, 4034, 1742, 2037, 352, 2820, 3912, 3287, 1218, 1190, 4145, 353, 2422, 354, 355, 925, 1782, 2184, 2261, 2490, 926, 927, 928, 4630, 2137, 3610, 356, 357, 4729, 358, 359, 4224, 1918, 1959, 1840, 3736, 1770, 929, 930, 931, 4155, 360, 361, 362, 932, 363, 364, 1279, 2289, 365, 1543, 366, 2156, 2472, 367, 4049, 1633, 1722, 368, 369, 1495, 1566, 370, 4967, 371, 372, 373, 1211, 1873, 2101, 2494, 1726, 374, 1442, 933, 1748, 4142, 1434, 1358, 1191, 3732, 4110, 4039, 4411, 4506, 4270, 4156, 3780, 4036, 4030, 4016, 1550, 3899, 1247, 1855, 1181, 3919, 1639, 3664, 1244, 4140, 3930, 4117, 4189, 4001, 3799, 3643, 3619, 1240, 1686, 1479, 1307, 1575, 4296, 1665, 3871, 4135, 1605, 4408, 3604, 1274, 4149, 1313, 3741, 1938, 3709, 1727, 3893, 1280, 3622, 1784, 3834, 1752, 1983, 1743, 3979, 4461, 4113, 3817, 4232, 1340, 1489, 4214, 3902, 1857, 2510, 2316, 1904, 1219, 1486, 1512, 1481, 1516, 3820, 3789, 4252, 4047, 4330, 4082, 4094, 1574, 1248, 4078, 1872, 1426, 3785, 3687, 4318, 4243, 3866, 3704, 4172, 1621, 4315, 1192, 1513, 1856, 2476, 3324, 2769, 2678, 1561, 3296, 375, 2348, 376, 377, 1395, 1584, 4093, 4453, 3940, 3778, 4374, 4210, 4009, 4264, 4339, 4368, 1738, 378, 1610, 4194, 4474, 4013, 4266, 1771, 1759, 1922, 3860, 3832, 1349, 1381, 3663, 1642, 1185, 4356, 3932, 1233, 4212, 3858, 1198, 4192, 3611, 1919, 1819, 3790, 3712, 1969, 4095, 1887, 4468, 1720, 4247, 934, 1790, 2002, 1657, 1663, 1336, 3894, 1554, 1494, 1405, 3576, 4314, 3695, 1851, 1850, 4362, 1815, 3845, 4511, 3656, 3638, 1406, 1596, 4454, 1443, 1661, 935, 4504, 1359, 1734, 3650, 1910, 1305, 1648, 3831, 4435, 1208, 1988, 4451, 1993, 1986, 3849, 1718, 4068, 1835, 1425, 1428, 1282, 4380, 1658, 1452, 1687, 4024, 379, 4072, 3791, 4491, 4323, 4014, 1304, 1440, 1511, 1981, 1676, 1547, 4422, 1283, 3861, 1383, 3644, 3691, 4259, 1749, 1418, 1176, 4216, 1387, 3992, 4423, 4253, 1618, 1871, 1256, 3748, 4119, 1297, 1586, 1251, 1299, 1954, 4450, 3990, 4029, 4097, 3890, 3796, 1389, 3711, 4344, 1578, 1476, 4343, 1202, 4413, 4384, 3808, 1647, 1475, 3892, 3674, 1739, 3926, 3595, 1943, 3756, 4405, 3973, 4109, 4159, 3744, 4387, 1960, 4275, 3781, 1535, 1210, 4492, 4365, 4118, 3655, 3886, 4278, 4383, 4485, 1392, 3751, 3931, 3986, 3678, 1249, 4353, 4208, 3710, 4238, 4213, 3969, 4436, 3175, 4128, 2970, 1228, 3534, 3437, 3406, 3641, 3639, 3954, 4335, 3995, 3582, 4475, 3784, 4470, 4010, 3802, 3941, 4427, 4396, 4348, 3587, 3818, 3864, 3956, 3863, 3731, 3814, 4067, 4354, 4350, 4334, 3821, 1932, 3929, 4171, 1258, 3824, 3631, 4465, 4494, 1320, 1398, 3828, 1204, 1223, 1284, 1685, 3773, 4209, 3014, 4462, 4246, 4190, 4312, 4023, 3760, 3753, 1178, 3884, 2783, 4038, 3545, 2916, 3112, 2834, 3880, 3673, 4102, 4399, 4048, 3752, 4207, 1235, 3943, 4355, 4087, 4100, 4327, 4037, 4163, 3918, 4486, 1243, 3933, 4178, 1662, 1643, 4152, 3634, 3617, 4445, 4303, 1370, 3838, 4199, 4284, 1213, 4382, 1399, 1187, 3714, 1828, 4487, 3615, 1842, 1501, 3746, 4018, 4420, 3606, 4121, 3724, 3935, 1941, 4419, 4282, 1955, 1949, 4310, 4488, 1577, 4127, 1288, 1171, 3670, 4052, 3627, 3777, 936, 1371, 3685, 1325, 1940, 380, 4482, 4258, 3812, 1581, 1860, 4124, 4508, 4500, 3652, 3972, 1309, 1630, 1528, 3717, 1217, 3692, 4430, 3764, 4316, 4285, 3645, 3971, 4421, 1172, 4026, 2740, 3125, 3546, 1725, 1206, 3842, 4404, 3690, 3962, 4513, 4340, 4329, 4410, 3703, 4136, 1763, 1487, 3589, 3907, 4153, 2707, 3730, 4426, 4180, 4041, 3923, 4444, 3851, 4429, 4361, 1441, 4394, 4302, 3758, 4510, 3742, 1868, 4077, 1710, 1939, 1335, 1666, 1407, 4187, 1193, 1188, 1196, 1724, 1717, 1200, 1646, 1997, 1975, 1701, 4280, 1613, 4006, 1984, 1351, 3653, 3833, 1593, 2561, 4442, 3900, 4298, 1761, 4388, 1820, 1597, 4317, 4249, 1341, 1203, 1680, 4441, 3628, 3725, 1945, 937, 4206, 1588, 1439, 3794, 4447, 1838, 3776, 3658, 4064, 1377, 4011, 4272, 4503, 1324, 1367, 3594, 3680, 1300, 1750, 938, 3913, 3774, 1877, 1987, 1862, 3998, 1380, 4185, 3686, 3696, 4463, 1350, 4008, 4230, 3853, 4244, 4083, 381, 1909, 3897, 1546, 382, 3613, 3273, 3452, 3525, 1229, 4105, 3835, 383, 1263, 1234, 3970, 1492, 3856, 3586, 1175, 4321, 4020, 4144, 1224, 1199, 3667, 2778, 4412, 4407, 1812, 1810, 3823, 1416, 1427, 1507, 1878, 4333, 3146, 4281, 4211, 1179, 3843, 1669, 1677, 1524, 1525, 1974, 384, 1979, 1456, 1239, 4167, 3740, 1876, 1388, 1967, 1474, 385, 1342, 1471, 4176, 1232, 1989, 4125, 1741, 1508, 1580, 4060, 4378, 1576, 1212, 1893, 3921, 3585, 1174, 1396, 4061, 4015, 1207, 3698, 3825, 3922, 4021, 4181, 1598, 1916, 1429, 4502, 4231, 1321, 4390, 3693, 3734, 1382, 3684, 1747, 3806, 3896, 3635, 1768, 4025, 3976, 3840, 3963, 4286, 1502, 3836, 4161, 3659, 3743, 4130, 3605, 1385, 1783, 4392, 4328, 1316, 4173, 4265, 1246, 1985, 1629, 1829, 1737, 3826, 1473, 1992, 1883, 1656, 1837, 1914, 1839, 1834, 3984, 4495, 3910, 4160, 3671, 4184, 4132, 4250, 1503, 1237, 1523, 1417, 4063, 1562, 3977, 1971, 1707, 1847, 1792, 3769, 4074, 1534, 4239, 4003, 3915, 1689, 1776, 1599, 1265, 1410, 1823, 1498, 1329, 939, 386, 387, 1655, 3874, 4261, 3626, 1791, 3579, 1644, 3936, 4054, 4260, 4359, 4131, 4297, 4357, 4022, 3770, 4046, 1222, 1996, 3788, 4169, 1925, 3953, 4228, 4226, 4277, 4101, 1889, 1369, 3797, 4088, 4019, 3771, 3632, 1402, 388, 1520, 1767, 1466, 1194, 4137, 1908, 1927, 1758, 3772, 3661, 4186, 4174, 1170, 3850, 1315, 1611, 1530, 1859, 2209, 4183, 1408, 1403, 941, 4033, 3623, 3596, 1461, 1848, 1173, 1928, 1459, 1765, 1826, 3719, 1931, 3584, 4004, 3591, 3967, 4168, 3957, 3878, 4165, 4191, 3980, 4058, 4200, 4336, 3958, 1260, 4051, 3798, 4032, 1774, 4322, 3991, 4106, 1641, 1570, 3978, 3965, 4464, 3813, 4154, 1365, 4257, 3846, 4345, 4379, 3603, 1693, 3937, 3801, 1787, 1214, 4483, 4201, 1898, 1845, 1226, 1220, 4245, 1347, 3867, 1900, 3640, 3916, 4089, 1209, 3745, 3988, 3975, 4236, 4075, 4146, 4256, 4308, 4000, 4148, 3588, 3868, 4403, 3883, 4326, 4393, 3895, 4237, 3955, 3727, 4005, 4092, 4372, 4283, 1553, 3805, 4151, 1281, 1681, 4489, 3982, 4437, 3597, 4342, 3872, 3987, 4490, 3876, 3668, 4300, 1679, 1242, 3598, 3583, 3647, 389, 4304, 3793, 3779, 1937, 1907, 4042, 3648, 3996, 3800, 4367, 4099, 1807, 3887, 4428, 1625, 1390, 1884, 1682, 4364, 4306, 3869, 1278, 1672, 942, 1505, 1542, 1709, 1915, 3600, 3914, 1968, 3948, 1670, 3811, 1865, 1362, 943, 1716, 3961, 1506, 4221, 1376, 944, 1683, 4276, 1445, 1721, 1632, 3607, 1328, 1455, 1913, 1497, 1317, 1951, 1778, 1379, 3768, 4225, 1668, 945, 390, 391, 4406, 4341, 1480, 392, 393, 394, 395, 1714, 1422, 396, 2043, 946, 2265, 397, 3618, 4433, 1177, 3898, 398, 2251, 947, 948, 2212, 949, 950, 399, 951, 400, 1965, 4640, 2345, 4471, 952, 953, 401, 402, 2475, 403, 404, 4758, 954, 955, 2437, 4139, 1482, 3602, 4434, 3721, 1592, 1825, 1698, 1519, 1352, 4202, 4409, 1977, 1917, 405, 406, 407, 408, 956, 957, 2267, 1631, 1684, 409, 2054, 3889, 958, 410, 2117, 411, 959, 412, 960, 2443, 4712, 4619, 2285, 413, 414, 415, 961, 2352, 2417, 962, 1905, 416, 963, 417, 418, 2382, 3675, 1833, 3974, 419, 964, 420, 421, 965, 966, 967, 4919, 968, 2365, 969, 970, 422, 1897, 2056, 2309, 1272, 4754, 2207, 971, 423, 4133, 3830, 4865, 972, 424, 973, 425, 2068, 4955, 426, 974, 2109, 2380, 427, 1708, 4676, 428, 4141, 429, 430, 3749, 431, 1619, 975, 4044, 3590, 1944, 4126, 1923, 1706, 432, 976, 977, 978, 4867, 4400, 433, 434, 1606, 2143, 979, 435, 980, 2604, 2895, 981, 436, 3448, 4959, 4563, 2188, 437, 438, 2055, 1692, 982, 2388, 2243, 983, 2035, 2120, 4940, 439, 440, 441, 2474, 4900, 2052, 4764, 3862, 4055, 4358, 984, 2435, 4589, 2276, 2401, 985, 1664, 443, 2073, 2405, 986, 4309, 4045, 3854, 3682, 2491, 444, 445, 1972, 2688, 4366, 3425, 3231, 3649, 2759, 2724, 3873, 3755, 1216, 3599, 3775, 2754, 2606, 3471, 3234, 2565, 2803, 2562, 2684, 3411, 3405, 2690, 1255, 3694, 446, 3985, 3535, 1306, 4084, 3282, 447, 1353, 2168, 1780, 987, 988, 989, 2126, 448, 449, 2107, 450, 2031, 990, 451, 452, 991, 1485, 2242, 453, 2286, 992, 1728, 993, 4703, 994, 995, 454, 1696, 996, 2039, 455, 997, 4874, 998, 3116, 1869, 456, 4759, 2500, 4798, 2262, 4562, 457, 1386, 999, 458, 4768, 4982, 4778, 2040, 1000, 4981, 3879, 2698, 459, 460, 1001, 461, 1447, 462, 1002, 2042, 2339, 1003, 463, 464, 4425, 1645, 465, 1004, 466, 2328, 467, 468, 469, 1231, 1468, 470, 471, 2496, 472, 473, 1005, 474, 475, 2108, 4725, 1006, 476, 1273, 1007, 1744, 1488, 1659, 477, 478, 4598, 1604, 4753, 2493, 479, 1008, 1009, 480, 1010, 1011, 1012, 1013, 1014, 481, 4313, 482, 483, 1499, 484, 1015, 4761, 2091, 2386, 2513, 1016, 4073, 1777, 2172, 485, 2205, 4592, 4545, 4720, 486, 1458, 4274, 2122, 4905, 4796, 2152, 4539, 4528, 4904, 4842, 4986, 4639, 4846, 4623, 4650, 4595, 2195, 4681, 487, 2182, 4710, 1775, 2083, 4205, 1526, 4586, 1697, 1017, 2000, 4692, 4795, 2480, 2017, 488, 2335, 489, 4969, 1894, 1882, 1817, 1880, 490, 1018, 3917, 3616, 4311, 1800, 4473, 4085, 4401, 1310, 3783, 3765, 1538, 3870, 491, 1948, 3699, 1735, 3792, 4290, 2074, 492, 5001, 2136, 493, 2211, 4532, 494, 2421, 495, 4090, 2378, 2104, 2210, 2247, 2478, 2047, 496, 4620, 4978, 4614, 1019, 2012, 1803, 3642, 497, 1322, 4752, 1020, 498, 1021, 2235, 2302, 2488, 4665, 4699, 4608, 4781, 499, 2049, 2404, 4685, 500, 501, 1022, 502, 1333, 503, 1023, 4686, 4804, 504, 4727, 505, 506, 4938, 4805, 2065, 1890, 4891, 1024, 507, 508, 509, 2110, 1025, 510, 1026, 3608, 1732, 511, 2397, 1864, 1816, 1531, 512, 513, 2451, 3636, 5012, 4892, 514, 1699, 4593, 1027, 4987, 515, 2495, 4660, 1028, 516, 1029, 2409, 1366, 2112, 2178, 2124, 2376, 5011, 4572, 4957, 4789, 4543, 4664, 4678, 2093, 4746, 2489, 4922, 2145, 1030, 4832, 4950, 1261, 4027, 3478, 3763, 2959, 1293, 2462, 517, 3197, 1595, 3413, 2067, 1031, 2228, 1448, 518, 4698, 4616, 2057, 2305, 2133, 2061, 4526, 4617, 1032, 1033, 2429, 2311, 1675, 1797, 519, 4578, 2271, 4693, 4604, 2466, 2148, 2420, 520, 4854, 2381, 2315, 2284, 4813, 521, 1034, 522, 523, 1999, 3759, 1215, 4122, 1730, 524, 525, 526, 3966, 4573, 5008, 1035, 527, 4973, 2508, 528, 3911, 529, 3289, 1821, 530, 531, 2426, 1036, 532, 1874, 533, 534, 1037, 535, 1038, 536, 1039, 537, 538, 539, 1040, 3767, 1929, 1041, 1042, 3683, 2100, 4853, 2300, 2165, 540, 2105, 541, 1043, 4906, 542, 1338, 2292, 2021, 1616, 1901, 1796, 1517, 4331, 4332, 4466, 2719, 3803, 4123, 4233, 1824, 3129, 3087, 3505, 4158, 4254, 1449, 2121, 1044, 3720, 4351, 4414, 1673, 3453, 3254, 2501, 1649, 543, 544, 545, 546, 1045, 547, 2225, 4240, 3580, 4680, 1046, 548, 549, 1047, 550, 2598, 551, 552, 553, 3819, 1259, 4062, 1048, 554, 2841, 1049, 1050, 3515, 2219, 1433, 1323, 4301, 555, 556, 1051, 557, 558, 1052, 1053, 3738, 1567, 559, 1054, 1270, 3857, 1055, 2151, 560, 2175, 2089, 1056, 4514, 2198, 2193, 1257, 1238, 3662, 561, 2186, 1057, 4637, 562, 1058, 563, 4872, 2097, 2436, 564, 1059, 565, 566, 1060, 1061, 2231, 4203, 1899, 3981, 1062, 1303, 4116, 567, 1063, 568, 569, 570, 2367, 1946, 3620, 1064, 1514, 4002, 3679, 3964, 3707, 3666, 1348, 4273, 1804, 4497, 571, 1401, 4438, 1895, 1264, 572, 1912, 573, 3939, 4170, 4056, 1271, 1065, 1521, 1221, 1066, 1451, 1654, 3934, 4080, 4352, 574, 1700, 3739, 1565, 1419, 1811, 3950, 1690, 1397, 3716, 1569, 1465, 1437, 1674, 4337, 1285, 4268, 1183, 3726, 3881, 4134, 4347, 4012, 3938, 4066, 4198, 4416, 4164, 3630, 4229, 4292, 4193, 4325, 4375, 4371, 4432, 4215, 1753, 3944, 1409, 4195, 1729, 4223, 1540, 4455, 1068, 1069, 4512, 1723, 1070, 3750, 3633, 4070, 4104, 4162, 4235, 1863, 4346, 1881, 1071, 1814, 1572, 575, 4443, 3761, 1346, 1587, 1072, 3592, 576, 1891, 4469, 1275, 577, 1950, 1963, 4129, 1073, 1296, 1360, 1551, 3733, 4111, 3993, 4108, 3949, 1287, 1713, 1556, 1736, 1995, 1435, 1424, 1830, 1705, 1861, 1197, 1254, 4120, 1545, 4417, 1469, 1292, 2185, 2279, 1785, 1236, 4293, 1827, 3839, 3983, 4395, 1957, 2222, 578, 3928, 4295, 3715, 3855, 3609, 1990, 4076, 4175, 3927, 1757, 1650, 4299, 1773, 2004, 1267, 1364, 579, 1462, 1879, 4007, 3729, 3665, 3722, 1691, 1712, 1074, 1624, 1751, 1394, 3924, 3952, 580, 581, 2003, 1343, 2203, 1559, 1250, 1555, 2304, 582, 2395, 4114, 1818, 1075, 583, 1076, 1077, 1704, 4448, 584, 4882, 1078, 1079, 1786, 585, 3354, 1832, 586, 3432, 2891, 587, 588, 4583, 2505, 1903, 2077, 4936, 4658, 4830, 2446, 1080, 2278, 1081, 1082, 4459, 1083, 589, 1563, 1084, 2113, 590, 591, 1085, 2256, 592, 2308, 593, 594, 2274, 595, 4931, 2407, 1858, 597, 598, 1453, 2559, 2590, 2738, 4478, 4069, 1809, 1327, 4150, 3260, 3481, 3672, 3625, 2008, 4439, 3852, 3997, 1411, 599, 3847, 4993, 1268, 4050, 3377, 4424, 1496, 4143, 4493, 3492, 1962, 1412, 2455, 600, 2457, 2321, 1086, 601, 4017, 4477, 1794, 2483, 4776, 2291, 602, 4263, 3072, 2009, 2199, 1754, 1087, 1088, 3888, 603, 604, 4777, 2324, 605, 1368, 3827, 4103, 606, 607, 1089, 2220, 4549, 1090, 1571, 1091, 1438, 608, 1092, 609, 2320, 2069, 610, 611, 1093, 612, 1094, 3701, 4389, 613, 4897, 1603, 614, 1095, 2154, 5000, 615, 616, 2263, 1332, 1715, 4369, 1652, 1096, 617, 1541, 618, 1921, 1733, 1373, 1870, 619, 4218, 1798, 2387, 1097, 1098, 1099, 1100, 620, 1702, 621, 622, 4855, 4847, 2398, 2239, 1101, 1667, 1384, 623, 4745, 3700, 1788, 1600, 624, 2098, 625, 4550, 4721, 4960, 4878, 2473, 4792, 4675, 1102, 1423, 626, 2771, 627, 1339, 3875, 628, 629, 3070, 4565, 2118, 2015, 4818, 4860, 2557, 2795, 2906, 2103, 4869, 2029, 3299, 3118, 4932, 4838, 4901, 4908, 4996, 4779, 2377, 4657, 4646, 4875, 4627, 4515, 4876, 4965, 4605, 4576, 2028, 4985, 4799, 4850, 1103, 4757, 4747, 1614, 1947, 2237, 630, 631, 4997, 4618, 4479, 3766, 632, 1104, 1105, 4886, 1106, 2432, 4827, 633, 1107, 4530, 634, 2371, 1108, 4536, 635, 1813, 636, 2431, 4866, 4991, 4814, 4560, 4956, 637, 4555, 1109, 4941, 4633, 2213, 638, 639, 3706, 1110, 640, 1111, 641, 4581, 4893, 4831, 2481, 4644, 4734, 2190, 4524, 4881, 4837, 4888, 4648, 642, 4548, 4807, 4896, 4868, 2374, 1112, 4823, 2164, 1113, 3735, 3390, 1694, 3431, 2838, 3483, 3464, 3848, 2558, 3314, 3086, 3029, 2956, 3517, 2651, 2914, 2680, 2632, 3121, 3100, 3528, 3526, 3084, 4220, 3304, 2846, 1186, 3235, 2903, 3559, 2687, 3409, 3237, 2900, 2999, 3349, 3171, 2752, 3262, 3504, 3047, 4376, 3193, 3430, 2525, 2670, 2911, 3508, 2776, 2697, 3200, 2790, 3323, 2543, 2874, 2614, 3904, 3373, 3054, 2617, 4242, 3621, 2708, 4179, 4398, 3959, 4935, 1269, 3095, 1286, 3624, 4481, 1432, 3511, 2735, 4381, 3295, 1585, 2390, 1568, 1114, 1766, 3221, 2643, 2739, 643, 4735, 4629, 1115, 4918, 4688, 3920, 644, 4723, 4949, 4748, 4607, 4719, 1116, 645, 646, 4611, 2353, 4603, 4762, 4819, 2221, 4636, 4992, 4998, 2307, 647, 1801, 4279, 3762, 1637, 1509, 4843, 4797, 4590, 4516, 4995, 4541, 2200, 4580, 4858, 648, 649, 2502, 2477, 4724, 4551, 4674, 1118, 1119, 2965, 2369, 2695, 3293, 650, 651, 4730, 4862, 4722, 4944, 1120, 652, 1121, 4983, 4784, 4877, 4643, 653, 654, 4909, 1122, 3264, 655, 2076, 4849, 656, 657, 2447, 658, 659, 2191, 4035, 2910, 3391, 2808, 3099, 2913, 3676, 2852, 3284, 2731, 1609, 2375, 2201, 3537, 3994, 1319, 4467, 1802, 1227, 1623, 660, 4844, 4714, 4979, 4812, 2192, 1123, 661, 2364, 662, 663, 664, 1124, 1125, 665, 2487, 4899, 2138, 1126, 666, 667, 4569, 4917, 2322, 1127, 1128, 1129, 668, 669, 1130, 670, 1131, 1527, 1132, 671, 1772, 2314, 1133, 1134, 2470, 1135, 672, 2236, 4716, 673, 4600, 2196, 674, 2456, 4588, 4963, 4851, 4558, 4557, 4697, 4610, 4773, 4687, 4708, 4910, 2123, 1136, 1137, 2358, 5005, 2208, 4952, 4945, 1933, 1731, 1793, 675, 676, 3342, 1138, 1139, 677, 4840, 4597, 4870, 1140, 4990, 4954, 4916, 678, 1141, 4737, 4527, 2253, 4531, 679, 1142, 1143, 680, 4771, 1144, 4638, 681, 4705, 4525, 4522, 4898, 2325, 2415, 5004, 1145, 682, 683, 2141, 1146, 684, 685, 2445, 686, 687, 4861, 688, 3822, 689, 690, 4743, 691, 1147, 1601, 692, 1148, 693, 4537, 4825, 4625, 4621, 3905, 694, 695, 1414, 1149, 696, 2027, 2159, 4756, 4690, 4859, 4793, 4575, 2160, 4828, 4731, 4718, 4802, 4750, 1150, 2081, 2258, 697, 1795, 1372, 1695, 1866, 1151, 4115, 1719, 2280, 4662, 698, 2176, 2217, 1920, 699, 700, 701, 4999, 1544, 4739, 2512, 702, 703, 4031, 4305, 1636, 1393, 2010, 3810, 4452, 3677, 4227, 1277, 1400, 4402, 4157, 4197, 1337, 1253, 1532, 4028, 3989, 2449, 4715, 704, 2050, 1493, 1854, 1902, 1510, 1152, 2340, 4182, 706, 4652, 2442, 2484, 707, 708, 709, 4667, 1153, 2412, 4732, 4476, 2053, 710, 1375, 711, 712, 713, 4829, 4738, 4811, 4570, 1245, 714, 2045, 4707, 715, 2169, 4713, 1841, 4234, 4924, 1154, 1314, 4096, 2023, 717, 4895, 2414, 718, 1155, 719, 720, 2063, 1311, 4921, 721, 4833, 4903, 4885, 4666, 2249, 4217, 1156, 723, 1157, 1627, 2116, 4566, 2287, 1158, 2330, 4826, 4622, 4740, 724, 4700, 725, 1159, 5013, 4894, 726, 2434, 1953, 1160, 1201, 727, 3787, 2046, 1161, 728, 729, 2485, 2044, 4568, 3747, 2248, 730, 731, 1846, 2507, 2368, 1162, 2019, 2333, 3815, 2005, 2266, 1964, 2347, 732, 2177, 2059, 4958, 4927, 1822, 4815, 1262, 2094, 4480, 1537, 1291, 2419, 1318, 4628, 4294, 2486, 4926, 1582, 2162, 733, 4587, 734, 735, 3439, 2833, 4287, 4509, 4505, 4267, 3697, 3272, 4112, 2967, 3651, 1991, 1805, 1628, 3705, 2479, 736, 1195, 4863, 1163, 3859, 1164, 2394, 1165, 2355, 2351, 4679, 4835, 2259, 4839, 2275, 1166, 4968, 4912, 2423, 737, 1167, 4989, 4684, 4612, 2127, 1745, 1973, 4767, 1168, 2273, 2310, 3807, 4307, 1169, 2303, 1454, or 1781.

31. The VP capsid polypeptide of claim 29, wherein the 581 to 589 region of the VP capsid polypeptide has a sequence of any one of SEQ ID NOs: 2498, 4884, 738, 739, 4177, 1289, 740, 14, 15, 741, 742, 743, 16, 744, 17, 18, 745, 3477, 1548, 3051, 2982, 2171, 2877, 746, 19, 20, 3036, 3426, 3073, 3169, 747, 2406, 3362, 2784, 2469, 4889, 21, 3192, 4942, 22, 23, 1638, 748, 24, 25, 749, 26, 27, 1703, 1836, 28, 2038, 2301, 3660, 29, 750, 30, 31, 2095, 1640, 33, 34, 35, 36, 37, 4742, 2450, 38, 4925, 39, 751, 752, 1653, 1205, 3795, 753, 4288, 4219, 2770, 2962, 4241, 4107, 2718, 3317, 4391, 4053, 3263, 2553, 3947, 2710, 2608, 3467, 2796, 2961, 2529, 3320, 2674, 2635, 3446, 3053, 3250, 3688, 1182, 1998, 4320, 3351, 2655, 3514, 2779, 3194, 3319, 3224, 3281, 3708, 2807, 3562, 3274, 3374, 3013, 3416, 2981, 3065, 2777, 3469, 2977, 2638, 2972, 3059, 2574, 3380, 4262, 3167, 3368, 2781, 3547, 3386, 1225, 2960, 3485, 3370, 3443, 2824, 754, 1467, 3327, 3178, 3006, 3252, 2991, 3470, 2888, 2572, 3418, 2642, 2519, 3363, 40, 2633, 41, 42, 43, 755, 2511, 44, 45, 756, 46, 757, 47, 48, 1952, 758, 2341, 2410, 49, 3122, 2551, 3718, 4806, 2216, 3484, 3577, 759, 2072, 2034, 50, 1308, 1230, 3960, 1378, 2994, 3080, 2589, 3681, 51, 4694, 2257, 2167, 52, 760, 53, 2389, 4934, 4951, 4755, 761, 4591, 762, 4659, 54, 2146, 3925, 55, 3654, 2087, 2346, 4766, 4682, 4984, 4744, 56, 763, 764, 4626, 4702, 57, 58, 59, 60, 61, 4086, 1740, 1660, 765, 766, 62, 1966, 2032, 2499, 2332, 767, 63, 2096, 2181, 4913, 2438, 2041, 64, 768, 769, 770, 2384, 2402, 771, 65, 66, 67, 772, 2458, 2197, 68, 3816, 69, 2599, 2706, 2497, 70, 2234, 2183, 2399, 71, 4769, 2366, 72, 73, 74, 3865, 1549, 1361, 2453, 3882, 773, 3713, 1942, 2140, 75, 1312, 4501, 76, 77, 774, 1413, 775, 776, 78, 1560, 4289, 3757, 79, 3593, 4043, 1806, 3908, 4397, 1615, 4415, 3723, 2006, 3754, 1470, 4360, 80, 3945, 2854, 3523, 3669, 1356, 777, 2132, 81, 82, 4065, 83, 84, 2030, 1294, 2413, 2064, 1484, 2299, 85, 4594, 86, 778, 87, 3891, 4456, 4040, 4496, 1982, 2001, 1478, 1189, 88, 1490, 1885, 1926, 89, 90, 91, 779, 2270, 780, 2161, 1180, 92, 781, 782, 783, 2356, 784, 785, 786, 94, 95, 787, 788, 1831, 1867, 96, 4458, 97, 1970, 4656, 2173, 1936, 2349, 1590, 4585, 98, 99, 100, 789, 790, 1298, 101, 1688, 791, 792, 2007, 4556, 2070, 102, 793, 4632, 103, 794, 795, 104, 105, 106, 2229, 796, 4691, 107, 2440, 1849, 108, 797, 4736, 2509, 2018, 2227, 4787, 109, 1579, 110, 1906, 111, 2428, 798, 2075, 112, 2411, 113, 2359, 799, 4848, 800, 2461, 1444, 2313, 2350, 4579, 4821, 801, 114, 2329, 4864, 4834, 115, 1344, 116, 802, 117, 118, 119, 4929, 4677, 120, 4791, 2158, 121, 803, 804, 1463, 805, 122, 2139, 2290, 1760, 2465, 123, 2424, 2058, 2230, 124, 4717, 806, 125, 126, 2370, 127, 4521, 128, 4971, 4994, 807, 4533, 129, 130, 131, 132, 4933, 808, 2336, 2026, 2204, 809, 810, 2281, 133, 1978, 134, 811, 812, 135, 136, 137, 138, 813, 814, 139, 4673, 140, 815, 1326, 141, 142, 143, 2344, 5009, 144, 145, 816, 4654, 2125, 4663, 4810, 4816, 1634, 1302, 817, 146, 818, 147, 148, 149, 4546, 150, 151, 152, 153, 154, 155, 819, 820, 156, 2149, 157, 2295, 821, 158, 160, 161, 4631, 2441, 162, 163, 164, 165, 166, 822, 167, 168, 169, 170, 171, 823, 172, 4613, 824, 1651, 173, 1483, 174, 175, 825, 176, 177, 178, 179, 4624, 4809, 4520, 180, 826, 827, 181, 828, 4695, 2130, 4911, 182, 4582, 4873, 4596, 2020, 2189, 183, 4641, 829, 184, 185, 2244, 4647, 186, 187, 188, 189, 190, 830, 191, 192, 193, 194, 2071, 4615, 2361, 195, 4852, 4914, 4947, 196, 1391, 197, 4534, 4726, 198, 199, 4920, 831, 2240, 2223, 200, 201, 202, 203, 2106, 2503, 4775, 204, 205, 832, 833, 206, 834, 2232, 2294, 207, 2166, 208, 209, 210, 835, 836, 1334, 837, 3901, 3312, 2649, 1301, 211, 212, 1450, 4386, 3028, 213, 1446, 214, 2206, 215, 1896, 1522, 3490, 838, 216, 2090, 2241, 217, 218, 4653, 219, 1612, 220, 221, 222, 839, 223, 4953, 4974, 4790, 4915, 2464, 4567, 4774, 4964, 2360, 840, 224, 4928, 4741, 225, 2088, 4751, 5007, 4542, 226, 227, 4890, 4519, 4883, 228, 4786, 229, 230, 231, 2448, 841, 842, 232, 233, 4782, 234, 4962, 2269, 843, 235, 844, 236, 237, 4930, 845, 846, 238, 847, 4704, 239, 848, 849, 2150, 850, 851, 852, 853, 1536, 240, 854, 241, 242, 243, 244, 245, 246, 247, 248, 4923, 2245, 4696, 855, 4634, 856, 249, 250, 251, 252, 253, 254, 255, 857, 2115, 2218, 256, 257, 258, 259, 858, 859, 260, 261, 860, 861, 862, 262, 4966, 863, 864, 263, 4749, 4970, 2296, 2318, 4535, 865, 2326, 264, 1241, 265, 266, 866, 1477, 267, 867, 268, 868, 269, 4668, 270, 869, 870, 271, 871, 872, 272, 4822, 4709, 873, 4655, 4972, 2317, 874, 1252, 273, 1591, 4975, 875, 274, 2025, 275, 1980, 276, 876, 877, 2066, 277, 278, 279, 4670, 280, 2323, 2288, 2334, 4939, 4689, 281, 878, 2416, 1892, 879, 1539, 2214, 2215, 880, 2327, 881, 882, 4601, 1295, 3601, 3877, 1930, 1420, 1678, 1460, 2306, 884, 282, 1799, 283, 284, 4988, 4871, 4553, 4772, 2260, 285, 1626, 885, 286, 1374, 886, 2119, 2504, 2468, 287, 2408, 1620, 1290, 2425, 2482, 4564, 4671, 2282, 288, 1354, 2033, 289, 887, 290, 888, 291, 1956, 2362, 2467, 889, 2357, 4547, 4765, 292, 4794, 2391, 4324, 293, 890, 294, 295, 4138, 891, 2297, 2254, 296, 2224, 3903, 297, 892, 3829, 298, 299, 3809, 4271, 3844, 1436, 300, 1515, 1617, 4701, 2174, 301, 1961, 4649, 5010, 302, 2060, 303, 304, 305, 2452, 2147, 4574, 4538, 306, 2293, 1589, 893, 4946, 4370, 4841, 2342, 307, 308, 309, 894, 2246, 2155, 3646, 4059, 1431, 1331, 311, 4836, 4948, 312, 895, 1779, 313, 314, 315, 316, 896, 1558, 1552, 317, 2312, 318, 319, 897, 320, 898, 321, 322, 899, 1958, 2022, 2016, 900, 2454, 323, 2427, 2134, 324, 901, 325, 902, 326, 2373, 4803, 2459, 1491, 327, 328, 903, 2463, 2264, 329, 330, 1635, 4820, 905, 331, 4706, 2092, 4484, 1756, 906, 907, 4661, 2179, 4584, 4609, 332, 4907, 4635, 4529, 4683, 4561, 333, 2337, 3536, 2701, 2799, 3332, 3294, 3159, 3069, 2637, 3025, 2782, 3247, 3350, 2692, 2586, 3004, 3049, 2694, 2650, 3554, 2983, 3403, 3214, 3163, 2541, 3090, 3097, 3462, 1430, 2941, 3486, 2842, 3558, 3104, 3037, 3419, 2780, 2931, 1276, 2928, 2609, 3068, 3128, 2548, 2538, 2618, 2789, 3228, 2657, 3189, 2128, 2863, 3307, 3300, 2546, 3048, 3543, 2946, 2975, 3346, 3067, 2728, 2955, 3408, 3027, 3094, 3203, 2988, 2751, 2953, 2566, 2578, 2823, 3063, 3335, 3000, 3181, 3011, 3138, 3389, 2805, 3074, 2894, 3149, 2560, 3417, 3265, 3378, 2901, 2837, 2822, 2745, 3473, 3530, 3040, 2597, 3509, 3522, 3161, 2926, 3209, 3105, 3400, 2630, 2905, 2671, 2818, 2806, 2702, 2709, 2400, 3549, 3538, 2534, 2773, 2623, 3491, 3243, 3136, 2693, 3164, 3343, 2918, 2555, 2794, 2679, 3510, 3110, 2672, 3442, 2929, 3184, 3488, 2135, 4763, 3414, 3093, 2996, 3141, 3544, 3102, 2856, 2957, 3466, 3461, 2788, 2660, 3344, 3204, 2720, 3379, 2826, 1789, 2396, 2785, 3249, 3527, 4460, 3352, 2051, 2569, 4457, 2011, 4857, 2163, 4783, 4319, 3906, 1533, 1755, 1888, 4248, 1557, 3804, 1363, 1934, 1602, 1404, 4188, 1330, 4349, 3337, 3533, 2629, 3038, 2539, 3567, 3291, 3348, 3115, 3359, 2993, 3079, 3506, 2527, 2963, 2938, 2516, 3113, 1345, 2639, 3143, 3044, 2747, 3154, 3280, 3039, 2743, 2902, 3056, 2554, 2522, 3103, 3210, 3434, 2656, 4251, 4166, 4196, 3206, 3328, 2588, 3553, 2714, 3078, 3222, 3137, 3357, 2717, 2944, 3012, 3220, 3202, 2811, 3083, 3269, 3566, 2699, 2515, 3023, 2533, 3288, 3075, 3005, 2685, 3058, 2976, 2622, 3333, 3463, 2939, 3521, 3268, 3117, 2626, 2616, 3240, 2570, 3565, 2919, 3157, 2849, 3444, 2631, 3420, 2659, 3325, 3186, 2920, 3258, 3440, 3457, 3310, 2761, 3134, 2621, 3531, 2711, 2774, 2867, 2585, 3155, 2620, 3156, 2844, 3126, 3160, 2909, 3542, 3225, 2887, 3474, 3218, 2744, 2896, 3135, 3424, 3498, 3529, 2661, 2667, 2549, 2819, 2768, 2935, 3182, 2772, 3230, 3043, 2922, 3581, 3524, 2869, 2610, 3298, 2775, 3108, 2603, 3614, 2612, 2860, 3187, 3238, 3786, 4385, 3016, 3436, 2876, 2987, 3532, 3438, 3561, 3259, 2663, 2890, 3433, 3071, 3018, 2580, 2755, 3015, 2540, 3398, 2664, 2583, 2830, 2644, 2641, 3513, 2725, 2723, 3338, 3556, 2866, 2514, 2932, 2753, 2862, 2899, 2605, 2989, 3096, 3124, 2985, 2716, 3145, 3017, 2591, 2640, 3033, 1853, 3216, 3316, 3412, 2971, 3256, 3153, 3575, 3339, 2915, 2531, 3552, 3475, 3060, 3375, 2756, 3382, 2847, 2859, 3251, 3702, 3423, 2537, 2801, 3076, 2696, 3092, 3459, 3144, 3441, 2802, 3479, 2907, 3512, 3518, 3021, 2871, 3032, 2647, 2945, 3045, 2763, 3313, 3034, 3315, 3541, 2746, 2669, 2524, 3003, 2732, 3166, 3046, 3306, 2873, 3364, 3253, 3215, 3061, 2804, 2722, 2964, 2990, 2836, 4098, 4449, 3173, 2762, 3737, 2628, 3507, 2564, 3031, 2872, 3360, 2658, 2930, 2904, 3244, 3217, 3311, 3445, 2840, 3372, 2958, 3098, 3356, 3456, 3388, 2624, 3207, 2576, 2742, 2665, 2815, 3052, 3421, 2593, 3242, 2535, 2966, 2898, 2858, 2943, 2668, 2798, 3196, 2528, 2713, 3001, 2691, 2948, 2767, 2544, 3302, 2734, 2893, 2592, 2861, 3502, 2969, 2582, 3229, 2676, 2545, 3255, 3330, 2547, 3257, 2882, 3151, 3088, 2883, 3318, 2645, 2733, 2587, 3500, 3008, 2715, 2845, 3183, 2654, 3233, 3267, 2741, 2827, 2704, 3091, 2832, 2736, 3177, 3271, 2835, 2908, 3176, 2947, 3292, 3191, 2517, 3026, 3082, 3392, 3381, 2584, 2712, 3213, 3451, 2634, 3150, 2810, 3303, 2573, 3460, 2615, 3394, 2828, 3329, 4377, 4499, 3555, 2974, 3782, 3629, 3578, 3885, 2817, 3248, 2954, 3334, 3571, 3345, 3551, 3384, 3422, 1357, 1844, 2530, 2973, 4418, 4081, 3951, 1764, 1671, 1852, 334, 1843, 3449, 3185, 3399, 2786, 3055, 3472, 3397, 2601, 3564, 3277, 4373, 3548, 3179, 3407, 3841, 3347, 3142, 4255, 4431, 3241, 3077, 2700, 3147, 2648, 3283, 2829, 3278, 2581, 2536, 4363, 2848, 3410, 2797, 2523, 2520, 2721, 3496, 2571, 3198, 3219, 3030, 2673, 2921, 3837, 3301, 3322, 2705, 3239, 2949, 3369, 3396, 2892, 2897, 2766, 3174, 3297, 2550, 2889, 2933, 2793, 2627, 2677, 3119, 2596, 3226, 3172, 3089, 2868, 2839, 3942, 3120, 3286, 2843, 3465, 1564, 3946, 4222, 1504, 3999, 2682, 1875, 2865, 3539, 3168, 2864, 3308, 3557, 2940, 3109, 3503, 2625, 3455, 3114, 2595, 3331, 2978, 2518, 2521, 4079, 3024, 3573, 2952, 2653, 1769, 3180, 2813, 2652, 2600, 2816, 3201, 3188, 3270, 2997, 2992, 3009, 3520, 2936, 3275, 3165, 3447, 3131, 3305, 2809, 2792, 2729, 2814, 2619, 3266, 2825, 3066, 2857, 2998, 3064, 2681, 3035, 3279, 2764, 3480, 3127, 2912, 3010, 2607, 3211, 3111, 3041, 1573, 3909, 4269, 3487, 3489, 3019, 335, 1266, 1415, 2980, 3428, 2444, 3435, 3482, 3020, 2748, 2646, 2787, 2760, 2563, 3085, 3133, 3158, 3170, 2703, 3494, 2556, 2552, 3395, 3245, 3404, 2675, 2791, 2252, 4845, 1911, 4856, 2363, 908, 1935, 4711, 4728, 2460, 4517, 2749, 3341, 3355, 2575, 2942, 2886, 2758, 2594, 3495, 2884, 3516, 3042, 2737, 2923, 3563, 2855, 3476, 2611, 2937, 3383, 3497, 3402, 3162, 2662, 2875, 3223, 2878, 2079, 1808, 3285, 2757, 3057, 2951, 3519, 2579, 2853, 3387, 3401, 3493, 3393, 1608, 3365, 2885, 3574, 3081, 3007, 3568, 3152, 3367, 3358, 336, 2268, 3468, 3290, 3550, 3132, 2726, 2879, 3190, 3309, 2613, 2765, 3106, 1355, 3454, 2851, 2881, 3232, 3458, 3326, 3353, 2927, 3212, 2950, 3376, 3208, 3062, 3612, 3195, 3385, 2686, 2602, 3569, 3123, 2727, 1622, 2821, 2636, 2750, 2850, 3050, 2925, 3336, 3540, 2689, 3139, 2526, 3361, 3022, 3427, 3107, 3140, 3371, 3276, 2831, 3501, 2924, 3366, 3199, 3101, 3321, 3499, 2917, 2683, 2800, 2812, 3340, 3227, 3148, 3657, 4446, 1746, 1464, 1886, 2666, 3246, 3130, 3560, 3236, 2730, 3572, 1607, 3689, 2968, 1457, 1500, 337, 1184, 3450, 2577, 2567, 2532, 3415, 2934, 2984, 2568, 4147, 4943, 3002, 2986, 910, 2979, 2542, 2338, 2331, 2492, 1762, 4472, 1472, 1529, 2319, 4057, 4937, 2048, 4887, 1976, 4507, 1583, 338, 2078, 2372, 2102, 339, 911, 1711, 340, 912, 2013, 913, 2277, 914, 2403, 341, 915, 4902, 916, 342, 1594, 4440, 917, 343, 344, 4559, 918, 2233, 2439, 919, 345, 920, 346, 921, 922, 347, 2226, 348, 2180, 2298, 349, 350, 2099, 2036, 351, 4808, 923, 924, 4498, 1518, 3728, 3637, 3570, 3429, 4091, 2870, 2995, 4338, 3205, 2880, 3261, 1994, 3968, 4291, 4204, 4071, 4034, 1742, 2037, 352, 2820, 3912, 3287, 1218, 1190, 4145, 353, 2422, 354, 355, 925, 1782, 2184, 2261, 2490, 926, 927, 928, 4630, 2137, 3610, 356, 357, 4729, 358, 359, 4224, 1918, 1959, 1840, 3736, 2471, 1770, 929, 930, 931, 4155, 360, 361, 362, 932, 363, 364, 1279, 2289, 365, 1543, 366, 2156, 2472, 367, 4049, 1633, 1722, 368, 369, 1495, 1566, 370, 4967, 371, 372, 373, 1211, 1873, 2101, 2494, 1726, 374, 1442, 933, 1748, 4142, 1434, 1358, 1191, 3732, 4110, 4039, 4411, 4506, 4270, 4156, 3780, 4036, 4030, 4016, 1550, 3899, 1247, 1855, 1181, 3919, 1639, 3664, 1244, 4140, 3930, 4117, 4189, 4001, 3799, 3643, 3619, 1240, 1686, 1479, 1307, 1575, 4296, 1665, 3871, 4135, 1605, 4408, 3604, 1274, 4149, 1313, 3741, 1938, 3709, 1727, 3893, 1280, 3622, 1784, 3834, 1752, 1983, 1743, 3979, 4461, 4113, 3817, 4232, 1340, 1489, 4214, 3902, 1857, 2510, 2316, 1904, 1219, 1486, 1512, 1481, 1516, 3820, 3789, 4252, 4047, 4330, 4082, 4094, 1574, 1248, 4078, 1872, 1426, 3785, 3687, 4318, 4243, 3866, 3704, 4172, 1621, 4315, 1192, 1513, 1856, 2476, 3324, 2769, 2678, 1561, 3296, 375, 2343, 2348, 376, 377, 1395, 1584, 4093, 4453, 3940, 3778, 4374, 4210, 4009, 4264, 4339, 4368, 1738, 378, 1610, 4194, 4474, 4013, 4266, 1771, 1759, 1922, 3860, 3832, 1349, 1381, 3663, 1642, 1185, 4356, 3932, 1233, 4212, 3858, 1198, 4192, 3611, 1919, 1819, 3790, 3712, 1969, 4095, 1887, 4468, 1720, 4247, 934, 1790, 2002, 1657, 1663, 1336, 3894, 1554, 1494, 1405, 3576, 4314, 3695, 1851, 1850, 4362, 1815, 3845, 4511, 3656, 3638, 1406, 1596, 4454, 1443, 1661, 935, 4504, 1359, 1734, 3650, 1910, 1305, 1648, 3831, 4435, 1208, 1988, 4451, 1993, 1986, 3849, 1718, 4068, 1835, 1425, 1428, 1282, 4380, 1658, 1452, 1687, 4024, 379, 4072, 3791, 4491, 4323, 4014, 1304, 1440, 1511, 1981, 1676, 1547, 4422, 1283, 3861, 1383, 3644, 3691, 4259, 1749, 1418, 1176, 4216, 1924, 1421, 1387, 3992, 4423, 4253, 1618, 1871, 1256, 3748, 4119, 1297, 1586, 1251, 1299, 1954, 4450, 3990, 4029, 4097, 3890, 3796, 1389, 3711, 4344, 1578, 1476, 4343, 1202, 4413, 4384, 3808, 1647, 1475, 3892, 3674, 1739, 3926, 3595, 1943, 3756, 4405, 3973, 4109, 4159, 3744, 4387, 1960, 4275, 3781, 1535, 1210, 4492, 4365, 4118, 3655, 3886, 4278, 4383, 4485, 1392, 3751, 3931, 3986, 3678, 1249, 4353, 4208, 3710, 4238, 4213, 3969, 4436, 3175, 4128, 2970, 1228, 3534, 3437, 3406, 3641, 3639, 3954, 4335, 3995, 3582, 4475, 3784, 4470, 4010, 3802, 3941, 4427, 4396, 4348, 3587, 3818, 3864, 3956, 3863, 3731, 3814, 4067, 4354, 4350, 4334, 3821, 1932, 3929, 4171, 1258, 3824, 3631, 4465, 4494, 1320, 1398, 3828, 1204, 1223, 1284, 1685, 3773, 4209, 3014, 4462, 4246, 4190, 4312, 4023, 3760, 1178, 3884, 2783, 4038, 3545, 2916, 3112, 2834, 3880, 3673, 4102, 4399, 4048, 3752, 4207, 1235, 3943, 4355, 4087, 4100, 4327, 4037, 4163, 3918, 4486, 1243, 3933, 4178, 1662, 1643, 4152, 3634, 3617, 4445, 4303, 1370, 3838, 4199, 4284, 1213, 4382, 1399, 1187, 3714, 1828, 4487, 3615, 1842, 1501, 3746, 4018, 4420, 3606, 4121, 3724, 3935, 1941, 4419, 4282, 1955, 1949, 4310, 4488, 1577, 4127, 1288, 1171, 3670, 4052, 3627, 3777, 936, 1371, 3685, 1325, 1940, 380, 4482, 4258, 3812, 1581, 1860, 4124, 4508, 4500, 3652, 3972, 1309, 1630, 1528, 3717, 1217, 3692, 4430, 3764, 4316, 4285, 3645, 3971, 4421, 1172, 4026, 2740, 3125, 3546, 1206, 3842, 4404, 3690, 3962, 4513, 4340, 4329, 4410, 3703, 4136, 1763, 1487, 3589, 3907, 4153, 2707, 3730, 4426, 4180, 4041, 3923, 4444, 3851, 4429, 4361, 1441, 4394, 4302, 3758, 4510, 3742, 1868, 4077, 1710, 1939, 1335, 1666, 1407, 4187, 1193, 1188, 1196, 1724, 1717, 1200, 1646, 1997, 1975, 1701, 4280, 1613, 4006, 1984, 1351, 3653, 3833, 1593, 2561, 4442, 3900, 4298, 1761, 4388, 1820, 1597, 4317, 4249, 1341, 1203, 1680, 4441, 3628, 3725, 1945, 937, 4206, 1588, 1439, 3794, 4447, 1838, 3776, 3658, 4064, 1377, 4011, 4272, 4503, 1324, 1367, 3594, 3680, 1300, 1750, 938, 3913, 3774, 1877, 1987, 1862, 3998, 1380, 4185, 3686, 3696, 4463, 1350, 4008, 4230, 3853, 4244, 4083, 381, 1909, 3897, 1546, 382, 3613, 3273, 3452, 3525, 1229, 4105, 3835, 383, 1263, 1234, 3970, 1492, 3856, 3586, 1175, 4321, 4020, 4144, 1224, 1199, 3667, 2778, 4412, 4407, 1812, 1810, 3823, 1416, 1427, 1507, 1878, 4333, 3146, 4281, 4211, 1179, 3843, 1669, 1677, 1524, 1525, 1974, 384, 1979, 1456, 1239, 4167, 3740, 1876, 1388, 1967, 1474, 385, 1342, 1471, 4176, 1232, 1989, 4125, 1741, 1508, 1580, 4060, 4378, 1576, 1212, 1893, 3921, 3585, 1174, 1396, 4061, 4015, 1207, 3698, 3825, 3922, 4021, 4181, 1598, 1916, 1429, 4502, 4231, 1321, 4390, 3693, 3734, 1382, 3684, 1747, 3806, 3896, 3635, 1768, 4025, 3976, 3840, 3963, 4286, 1502, 3836, 4161, 3659, 3743, 4130, 3605, 1385, 1783, 4392, 4328, 1316, 4173, 4265, 1246, 1985, 1629, 1829, 1737, 3826, 1473, 1992, 1883, 1656, 1837, 1914, 1839, 1834, 3984, 4495, 3910, 4160, 3671, 4184, 4132, 4250, 1503, 1237, 1523, 1417, 4063, 1562, 3977, 1971, 1707, 1847, 1792, 3769, 4074, 1534, 4239, 4003, 3915, 1689, 1776, 1599, 1265, 1410, 1823, 1498, 1329, 939, 386, 940, 387, 1655, 3874, 4261, 3626, 1791, 3579, 1644, 3936, 4054, 4260, 4359, 4131, 4297, 4357, 4022, 3770, 4046, 1222, 1996, 3788, 4169, 1925, 3953, 4228, 4226, 4277, 4101, 1889, 1369, 3797, 4088, 4019, 3771, 3632, 1402, 388, 1520, 1767, 1466, 1194, 4137, 1908, 1927, 1758, 3772, 3661, 4186, 4174, 1170, 3850, 1315, 1611, 1530, 1859, 2209, 4183, 1408, 1403, 941, 4033, 3623, 3596, 1461, 1848, 1173, 1928, 1459, 1765, 1826, 3719, 1931, 3584, 4004, 3591, 3967, 4168, 3957, 3878, 4165, 4191, 3980, 4058, 4200, 4336, 3958, 1260, 4051, 3798, 4032, 1774, 4322, 3991, 4106, 1641, 1570, 3978, 3965, 4464, 3813, 4154, 1365, 4257, 3846, 4345, 4379, 3603, 1693, 3937, 3801, 1787, 1214, 4483, 4201, 1898, 1845, 1226, 1220, 4245, 1347, 3867, 1900, 3640, 3916, 4089, 1209, 3745, 3988, 3975, 4236, 4075, 4146, 4256, 4308, 4000, 4148, 3588, 3868, 4403, 3883, 4326, 4393, 3895, 4237, 3955, 3727, 4005, 4092, 4372, 4283, 1553, 3805, 4151, 1281, 1681, 4489, 3982, 4437, 3597, 4342, 3872, 3987, 4490, 3876, 3668, 4300, 1679, 1242, 3598, 3583, 3647, 389, 4304, 3793, 3779, 1937, 1907, 4042, 3648, 3996, 3800, 4367, 4099, 1807, 3887, 4428, 1625, 1390, 1884, 1682, 4364, 4306, 3869, 1278, 1672, 942, 1505, 1542, 1709, 1915, 3600, 3914, 1968, 3948, 1670, 3811, 1865, 1362, 943, 1716, 3961, 1506, 4221, 1376, 944, 1683, 4276, 1445, 1721, 1632, 3607, 1328, 1455, 1913, 1497, 1317, 1951, 1778, 1379, 3768, 4225, 1668, 2383, 945, 390, 391, 4406, 4341, 1480, 392, 393, 394, 395, 1714, 1422, 396, 2043, 946, 2265, 397, 3618, 4433, 1177, 3898, 398, 2251, 947, 948, 2212, 949, 950, 399, 951, 400, 1965, 4640, 2129, 2345, 4471, 952, 953, 401, 2475, 403, 404, 4758, 954, 955, 2437, 4139, 1482, 3602, 4434, 3721, 1592, 1825, 1698, 1519, 1352, 4202, 4409, 1977, 1917, 405, 406, 407, 408, 956, 2272, 957, 2267, 1631, 1684, 409, 2054, 3889, 958, 410, 2117, 411, 959, 412, 960, 2443, 4712, 4619, 2285, 413, 414, 415, 961, 2352, 2417, 962, 1905, 416, 963, 417, 418, 2382, 3675, 1833, 3974, 419, 964, 420, 421, 965, 966, 967, 968, 2365, 969, 970, 422, 1897, 2056, 2309, 4733, 1272, 4754, 2207, 971, 423, 4133, 3830, 4865, 972, 424, 973, 425, 4955, 426, 974, 2109, 2380, 427, 1708, 4676, 428, 4141, 429, 430, 3749, 431, 1619, 975, 4044, 3590, 1944, 4126, 1923, 1706, 432, 976, 977, 978, 4867, 4400, 433, 434, 1606, 979, 435, 980, 2604, 2895, 981, 436, 3448, 4959, 4563, 2188, 437, 438, 2055, 1692, 982, 2388, 2433, 2243, 983, 2035, 2120, 4940, 439, 440, 441, 2474, 442, 4900, 2052, 4764, 3862, 4055, 4358, 984, 2435, 4589, 2276, 2401, 985, 1664, 443, 2073, 2405, 986, 4309, 4045, 3854, 3682, 2491, 444, 445, 1972, 2688, 4366, 3425, 3231, 3649, 2759, 2724, 3873, 3755, 1216, 3599, 3775, 2754, 2606, 3471, 3234, 2565, 2803, 2562, 2684, 3411, 3405, 2690, 1255, 3694, 446, 3985, 3535, 1306, 4084, 3282, 447, 1353, 2168, 1780, 987, 988, 989, 2126, 448, 449, 2107, 450, 2031, 990, 451, 452, 991, 1485, 2242, 453, 2286, 992, 1728, 993, 4703, 994, 995, 454, 1696, 996, 2039, 997, 998, 3116, 1869, 456, 4759, 2500, 4798, 2262, 4562, 457, 1386, 999, 458, 4768, 4982, 4778, 2040, 1000, 4981, 3879, 2698, 459, 460, 1001, 461, 1447, 462, 1002, 2042, 2339, 1003, 463, 464, 4425, 1645, 465, 1004, 466, 2328, 467, 468, 469, 1231, 1468, 470, 471, 2496, 472, 473, 1005, 474, 2108, 4725, 1006, 476, 1273, 1007, 1744, 1488, 1659, 477, 478, 4598, 1604, 4753, 2493, 479, 1008, 1009, 1010, 1011, 1012, 1013, 1014, 481, 4313, 482, 483, 1499, 484, 1015, 4761, 2091, 2386, 2513, 1016, 4073, 1777, 2172, 485, 2205, 4592, 4545, 4720, 486, 1458, 4274, 2122, 4905, 5003, 4599, 4796, 2152, 4539, 4528, 4904, 4842, 4986, 4639, 4846, 4623, 4650, 4595, 2195, 4681, 2142, 487, 2182, 4710, 1775, 2083, 4205, 1526, 4586, 4602, 4518, 1697, 1017, 2000, 4692, 2480, 2017, 488, 2335, 489, 4969, 1894, 1882, 1817, 1880, 490, 1018, 3917, 3616, 4311, 1800, 4473, 4085, 4401, 1310, 3783, 3765, 1538, 3870, 491, 1948, 3699, 1735, 3792, 4290, 2074, 492, 2202, 5001, 2136, 493, 2211, 4532, 494, 2421, 495, 4090, 2378, 2210, 2247, 2478, 2047, 496, 4620, 4978, 1019, 2012, 1803, 3642, 497, 1322, 4752, 1020, 498, 1021, 2235, 2302, 2488, 4665, 4540, 5006, 4699, 4608, 4781, 499, 2049, 2404, 4685, 500, 501, 1022, 502, 1333, 503, 1023, 4686, 4804, 504, 4727, 505, 506, 4805, 2065, 1890, 1024, 507, 508, 509, 2110, 1025, 510, 1026, 3608, 1732, 511, 2397, 1864, 1816, 1531, 512, 513, 2451, 3636, 4892, 514, 1699, 4593, 1027, 4987, 515, 2495, 4660, 1028, 516, 1029, 2409, 1366, 2112, 2178, 2124, 2376, 5011, 4572, 4957, 4789, 4543, 4664, 4678, 4746, 2489, 4922, 2145, 1030, 4832, 4950, 1261, 4027, 3478, 3763, 2959, 1293, 2462, 517, 3197, 1595, 3413, 2238, 2067, 1031, 2228, 1448, 518, 4698, 4616, 2057, 2305, 2133, 2061, 4526, 4617, 1032, 1033, 2429, 2311, 1675, 4785, 1797, 519, 4578, 2271, 4693, 4604, 2466, 2148, 2420, 520, 4854, 2381, 2315, 2284, 4813, 521, 1034, 522, 523, 1999, 3759, 1215, 4122, 1730, 524, 525, 526, 3966, 4573, 5008, 1035, 527, 4973, 2508, 528, 3911, 529, 3289, 1821, 530, 531, 2426, 1036, 532, 1874, 533, 534, 1037, 1038, 536, 1039, 537, 538, 539, 1040, 3767, 1929, 1041, 1042, 3683, 2100, 4853, 2300, 2165, 540, 2105, 541, 4906, 542, 1338, 2292, 2021, 1616, 1901, 1796, 1517, 4331, 4332, 4466, 2719, 3803, 4123, 4233, 1824, 3129, 3087, 3505, 4158, 4254, 1449, 2121, 1044, 3720, 4351, 4414, 1673, 3453, 3254, 2501, 1649, 543, 544, 545, 546, 1045, 547, 2084, 2225, 4240, 3580, 4680, 1046, 548, 2062, 549, 1047, 550, 2598, 551, 552, 553, 3819, 1259, 4062, 1048, 554, 2841, 1049, 1050, 3515, 1433, 1323, 4301, 555, 556, 1051, 557, 558, 1052, 1053, 3738, 1567, 559, 1054, 1270, 3857, 1055, 2151, 560, 2175, 2089, 4514, 2198, 2193, 1257, 1238, 3662, 561, 2186, 1057, 562, 1058, 563, 4872, 2097, 2436, 564, 1059, 565, 566, 1060, 1061, 2231, 4203, 1899, 3981, 1062, 1303, 4116, 567, 1063, 568, 569, 570, 2367, 1946, 3620, 1064, 1514, 4002, 3679, 3964, 3707, 3666, 1348, 4273, 1804, 4497, 571, 1401, 4438, 1895, 1264, 572, 1912, 573, 3939, 4170, 4056, 1271, 1065, 1521, 1221, 1066, 1451, 1654, 1067, 3934, 4080, 4352, 574, 1700, 3739, 1565, 1419, 1811, 3950, 1690, 1397, 3716, 1569, 1437, 1674, 4337, 1285, 4268, 1183, 3726, 3881, 4134, 4347, 4012, 3938, 4066, 4198, 4416, 4164, 3630, 4229, 4292, 4193, 4325, 4375, 4371, 4432, 4215, 1753, 3944, 1409, 4195, 1729, 4223, 1540, 4455, 1068, 1069, 4512, 1723, 1070, 3750, 3633, 4070, 4104, 4162, 4235, 1863, 4346, 1881, 1071, 1814, 1572, 2418, 575, 4443, 3761, 1346, 1587, 1072, 3592, 576, 1891, 4469, 2430, 1275, 577, 1950, 1963, 4129, 1073, 1296, 1360, 1551, 3733, 4111, 3993, 4108, 3949, 1287, 1713, 1556, 1736, 1995, 1435, 1424, 1705, 1861, 1197, 1254, 4120, 1545, 4417, 1469, 1292, 2185, 1785, 1236, 4293, 1827, 3839, 3983, 4395, 1957, 578, 3928, 4295, 3715, 3855, 3609, 1990, 4076, 4175, 3927, 1757, 1650, 4299, 1773, 2004, 1267, 1364, 579, 1462, 1879, 4007, 3729, 3665, 3722, 1691, 1712, 1074, 1624, 1751, 1394, 3924, 3952, 580, 581, 2003, 1343, 2203, 1559, 1250, 1555, 2304, 582, 2395, 4114, 1818, 1075, 583, 1076, 1077, 1704, 4448, 584, 4882, 1078, 1079, 1786, 585, 3354, 1832, 586, 3432, 2891, 587, 588, 4583, 2505, 1903, 2077, 4936, 4658, 4830, 2446, 1080, 2278, 1081, 1082, 4459, 1083, 589, 1563, 1084, 2255, 2113, 590, 591, 1085, 2256, 592, 2308, 593, 594, 595, 4931, 2407, 1858, 596, 597, 598, 1453, 2559, 2590, 2738, 4478, 4069, 1809, 1327, 4150, 3260, 3481, 3672, 3625, 2008, 4439, 3852, 3997, 1411, 599, 3847, 4993, 1268, 4050, 3377, 4424, 1496, 4143, 4493, 3492, 1962, 1412, 2455, 600, 2457, 2321, 1086, 601, 4017, 4477, 1794, 2483, 4776, 2291, 602, 4263, 3072, 2009, 2199, 1754, 1087, 1088, 3888, 603, 604, 4777, 2324, 605, 1368, 3827, 4103, 606, 607, 1089, 2220, 4549, 1090, 1571, 1091, 1438, 608, 1092, 609, 2320, 2069, 610, 611, 1093, 612, 1094, 3701, 4389, 613, 4897, 1603, 614, 1095, 2154, 5000, 615, 616, 2263, 1332, 1715, 4369, 1652, 1096, 617, 1541, 618, 1921, 1733, 1373, 1870, 619, 4218, 1798, 2387, 1097, 1098, 1099, 1100, 620, 1702, 621, 622, 4801, 4855, 4847, 2398, 2239, 1101, 1667, 1384, 623, 4745, 3700, 1788, 1600, 624, 2098, 625, 4550, 4721, 4960, 2473, 4792, 4675, 1102, 1423, 626, 2771, 627, 1339, 3875, 628, 629, 3070, 4565, 2118, 2015, 4818, 4860, 2557, 2795, 2906, 2103, 4869, 2029, 3299, 3118, 4932, 4838, 4901, 4908, 4996, 4779, 2377, 4657, 4646, 4875, 4627, 4515, 4876, 4965, 4605, 4576, 2028, 4985, 4799, 4850, 1103, 4757, 4747, 1614, 1947, 2237, 630, 631, 4997, 4618, 4479, 3766, 632, 1104, 1105, 4886, 1106, 2432, 4827, 633, 1107, 4530, 634, 2371, 4651, 1108, 4536, 635, 1813, 636, 2431, 4866, 4991, 4814, 4560, 4956, 637, 4555, 1109, 4577, 4633, 2213, 638, 639, 3706, 1110, 640, 1111, 641, 4581, 4893, 4831, 2481, 4644, 4734, 2190, 4881, 4837, 4888, 4648, 642, 4548, 4807, 4896, 4868, 2374, 1112, 4823, 2164, 1113, 3735, 3390, 1694, 3431, 2838, 3483, 3464, 3848, 2558, 3314, 3086, 3029, 2956, 3517, 2651, 2914, 2680, 2632, 3121, 3100, 3528, 3526, 3084, 4220, 3304, 2846, 1186, 3235, 2903, 3559, 2687, 3409, 3237, 2900, 2999, 3349, 3171, 2752, 3262, 3504, 3047, 4376, 3193, 3430, 2525, 2670, 2911, 3508, 2776, 2697, 3200, 2790, 3323, 2543, 2874, 2614, 3904, 3373, 3054, 2617, 4242, 3621, 2708, 4179, 4398, 3959, 4935, 1269, 3095, 1286, 3624, 4481, 1432, 3511, 2735, 4381, 3295, 1585, 2390, 1568, 1114, 1766, 3221, 2643, 2739, 643, 4735, 4760, 4629, 1115, 4918, 4688, 3920, 644, 4723, 4949, 4607, 4719, 1116, 645, 646, 4611, 2353, 4645, 4603, 4762, 4819, 2221, 4636, 4992, 2307, 647, 1801, 4279, 3762, 1637, 1509, 4843, 4797, 4590, 4516, 4541, 2200, 4580, 4858, 648, 649, 1117, 4780, 4800, 2477, 4724, 4551, 4674, 1118, 1119, 2965, 2369, 2695, 3293, 650, 651, 4862, 4722, 4944, 1120, 652, 1121, 4983, 4784, 4877, 653, 654, 1122, 3264, 655, 2076, 4849, 656, 657, 2447, 658, 659, 2191, 4035, 2910, 3391, 2808, 3099, 2913, 3676, 2852, 3284, 2731, 1609, 2375, 3537, 3994, 1319, 4467, 1802, 1227, 1623, 660, 4844, 2086, 4770, 4714, 4979, 4812, 2192, 1123, 661, 2364, 662, 663, 664, 1124, 1125, 665, 2487, 4899, 2138, 1126, 666, 667, 4569, 4554, 4917, 2322, 1127, 1128, 1129, 668, 669, 1130, 670, 1131, 1527, 1132, 671, 1772, 2314, 1133, 1134, 2470, 1135, 672, 2236, 4716, 673, 4600, 2196, 674, 2456, 4606, 4588, 4963, 4851, 4558, 4557, 4697, 4610, 4773, 4687, 4708, 4910, 2123, 1136, 1137, 2358, 5005, 2208, 4952, 4945, 1933, 1731, 1793, 675, 676, 3342, 1138, 1139, 677, 4840, 4597, 4870, 1140, 4990, 4954, 4916, 678, 1141, 4737, 4527, 2253, 4531, 679, 1142, 1143, 680, 4771, 1144, 4638, 681, 4705, 4525, 4898, 2325, 2415, 5004, 1145, 682, 683, 2141, 1146, 684, 685, 2445, 686, 687, 4861, 2157, 688, 3822, 689, 690, 4743, 691, 1147, 1601, 692, 1148, 693, 4537, 4825, 4625, 4621, 3905, 694, 695, 1414, 1149, 696, 2027, 2159, 4756, 4690, 4859, 4793, 4575, 2160, 4828, 4731, 4802, 4750, 1150, 2081, 2258, 697, 1795, 1372, 1695, 1866, 1151, 4115, 1719, 2280, 4662, 698, 2176, 2194, 2217, 1920, 699, 700, 701, 4999, 1544, 4739, 2512, 702, 703, 4031, 4305, 1636, 1393, 2010, 3810, 4452, 3677, 4227, 1277, 1400, 4402, 4157, 4197, 1337, 1253, 1532, 4028, 3989, 2449, 4715, 704, 2050, 1493, 1854, 1902, 1510, 1152, 4824, 705, 2340, 4182, 706, 4652, 2442, 2484, 707, 708, 709, 4667, 1153, 2412, 4732, 4476, 2053, 710, 1375, 711, 712, 713, 4738, 4811, 4570, 4961, 1245, 714, 2045, 4707, 715, 2169, 4713, 4879, 1841, 4234, 4924, 1154, 1314, 4096, 2023, 716, 717, 4895, 2414, 718, 1155, 719, 720, 2063, 1311, 4921, 721, 4642, 722, 4833, 4903, 4885, 4666, 2249, 4217, 1156, 723, 1157, 1627, 2116, 2287, 1158, 2330, 4826, 4622, 4740, 724, 4700, 725, 1159, 5013, 4894, 726, 2434, 1953, 1160, 1201, 727, 3787, 2046, 1161, 728, 729, 2485, 2044, 4568, 3747, 2248, 730, 731, 2024, 1846, 2507, 2368, 1162, 2019, 2333, 3815, 2005, 2266, 1964, 2347, 2385, 732, 2177, 2059, 4958, 4927, 1822, 4815, 1262, 2094, 4480, 1537, 1291, 2419, 1318, 2283, 4976, 4628, 4294, 4926, 1582, 2162, 733, 4587, 734, 735, 3439, 2833, 4287, 4509, 4505, 4267, 3697, 3272, 4112, 2967, 3651, 1991, 1805, 1628, 3705, 2479, 736, 1195, 4863, 1163, 3859, 1164, 2394, 1165, 2355, 2351, 4835, 2259, 4571, 2275, 1166, 4968, 2250, 2423, 737, 1167, 4989, 4669, 4552, 4612, 2127, 1745, 1973, 4767, 1168, 2273, 2310, 3807, 4307, 1169, 2303, 1454, or 1781.

32. The VP capsid polypeptide of claim 29, wherein the 581 to 589 region of the VP capsid polypeptide has a sequence of any one of SEQ ID NOs: 738, 739, 4177, 1289, 740, 14, 15, 741, 742, 743, 16, 744, 17, 18, 745, 3477, 1548, 3051, 2982, 2171, 2877, 746, 19, 20, 3036, 3426, 3073, 3169, 747, 2406, 3362, 2784, 2469, 4889, 21, 3192, 4942, 22, 23, 1638, 748, 24, 25, 749, 26, 27, 1703, 1836, 28, 2038, 2301, 3660, 29, 750, 30, 31, 2095, 1640, 33, 34, 35, 36, 37, 4742, 2450, 38, 4925, 39, 751, 752, 1653, 1205, 3795, 753, 4288, 4219, 2770, 2962, 4241, 4107, 2718, 3317, 4391, 4053, 3263, 2553, 3947, 2710, 2608, 3467, 2796, 2961, 2529, 3320, 2674, 2635, 3446, 3053, 3250, 3688, 1182, 1998, 4320, 3351, 2655, 3514, 2779, 3194, 3319, 3224, 3281, 3708, 2807, 3562, 3274, 3374, 3013, 3416, 2981, 3065, 2777, 3469, 2977, 2638, 2972, 3059, 2574, 3380, 4262, 3167, 3368, 2781, 3547, 3386, 1225, 2960, 3485, 3370, 3443, 2824, 754, 1467, 3327, 3178, 3006, 3252, 2991, 3470, 2888, 2572, 3418, 2642, 2519, 3363, 40, 2633, 41, 42, 43, 755, 2511, 44, 45, 756, 46, 757, 47, 48, 1952, 758, 2341, 2410, 49, 3122, 2551, 3718, 4806, 2216, 3484, 3577, 759, 2072, 2034, 50, 1308, 1230, 3960, 1378, 2994, 3080, 2589, 3681, 51, 2167, 52, 760, 53, 2389, 4755, 761, 4591, 762, 4659, 54, 2146, 3925, 55, 3654, 2087, 2346, 4766, 4682, 4984, 4744, 56, 763, 764, 4626, 4702, 57, 58, 59, 60, 61, 4086, 1740, 1660, 765, 766, 62, 1966, 2032, 2499, 2332, 767, 63, 2096, 2181, 4913, 2438, 2041, 64, 768, 769, 770, 2384, 2402, 771, 65, 66, 67, 772, 2458, 2197, 68, 3816, 69, 2599, 2706, 2497, 70, 2399, 71, 4769, 2366, 72, 73, 74, 3865, 1549, 1361, 2453, 3882, 773, 3713, 1942, 2140, 75, 1312, 4501, 76, 77, 774, 1413, 775, 776, 78, 1560, 4289, 3757, 79, 3593, 4043, 1806, 3908, 4397, 1615, 4415, 3723, 2006, 3754, 1470, 4360, 80, 3945, 2854, 3523, 3669, 1356, 777, 81, 82, 4065, 83, 84, 2030, 1294, 2413, 2064, 1484, 2299, 85, 4594, 86, 778, 87, 3891, 4456, 4040, 4496, 1982, 2001, 1478, 1189, 88, 1490, 1885, 1926, 89, 90, 91, 779, 2270, 780, 2161, 1180, 92, 781, 782, 783, 2356, 784, 785, 786, 94, 95, 788, 1831, 1867, 96, 4458, 97, 1970, 4656, 2173, 1936, 2349, 1590, 98, 99, 100, 789, 790, 1298, 101, 1688, 791, 792, 2007, 4556, 2070, 102, 793, 4632, 103, 794, 795, 104, 105, 106, 2229, 796, 4691, 107, 2440, 1849, 108, 797, 4736, 2509, 2018, 2227, 4787, 1579, 110, 1906, 111, 2428, 798, 2075, 112, 2411, 113, 2359, 799, 4848, 800, 2461, 1444, 2313, 2350, 4579, 4821, 801, 114, 2329, 4864, 4834, 115, 1344, 116, 802, 117, 118, 119, 4929, 4677, 120, 4791, 2158, 121, 803, 804, 1463, 805, 122, 2139, 2290, 1760, 2465, 123, 2424, 2058, 2230, 124, 4717, 806, 125, 126, 2370, 127, 4521, 128, 4971, 4994, 807, 4533, 129, 130, 131, 132, 4933, 808, 2336, 2026, 2204, 809, 810, 2281, 133, 1978, 134, 811, 812, 135, 136, 137, 138, 813, 814, 139, 4673, 140, 815, 1326, 141, 142, 143, 2344, 5009, 144, 145, 816, 4654, 2125, 4663, 4810, 4816, 1634, 1302, 817, 146, 818, 147, 148, 149, 4546, 150, 151, 152, 153, 154, 155, 819, 820, 156, 2149, 157, 2295, 821, 158, 160, 161, 4631, 2441, 162, 163, 164, 165, 166, 822, 167, 168, 169, 170, 171, 823, 172, 4613, 824, 1651, 173, 1483, 174, 175, 825, 176, 177, 178, 179, 4624, 4809, 4520, 180, 826, 827, 181, 828, 4695, 2130, 4911, 182, 4582, 4873, 2189, 183, 4641, 829, 184, 185, 2244, 4647, 186, 187, 188, 189, 190, 830, 191, 192, 193, 194, 2071, 4615, 2361, 195, 4852, 4914, 4947, 196, 1391, 197, 4534, 4726, 198, 199, 831, 2240, 2223, 200, 201, 202, 203, 2106, 2503, 4775, 204, 205, 832, 833, 206, 834, 2232, 2294, 207, 2166, 208, 209, 210, 835, 836, 1334, 837, 3901, 3312, 2649, 1301, 211, 212, 1450, 4386, 3028, 213, 1446, 214, 2206, 215, 1896, 1522, 3490, 838, 216, 2090, 2241, 217, 218, 4653, 219, 1612, 220, 221, 222, 839, 223, 4974, 4790, 4915, 2464, 4567, 4774, 4964, 2360, 840, 224, 4928, 4741, 225, 2088, 4751, 226, 227, 4890, 4519, 4883, 228, 4786, 229, 230, 231, 2448, 841, 842, 232, 233, 4782, 234, 2269, 843, 235, 844, 236, 237, 4930, 845, 846, 238, 847, 239, 848, 849, 2150, 850, 851, 852, 853, 1536, 240, 854, 241, 242, 243, 244, 245, 246, 247, 248, 4696, 855, 4634, 856, 249, 250, 251, 252, 253, 254, 255, 857, 2115, 2218, 256, 257, 258, 259, 858, 859, 260, 261, 860, 861, 862, 262, 4966, 863, 864, 263, 4749, 4970, 2296, 2318, 4535, 865, 2326, 264, 1241, 265, 266, 866, 1477, 267, 867, 268, 868, 269, 4668, 270, 869, 870, 271, 871, 872, 272, 4822, 4709, 873, 4655, 4972, 2317, 874, 1252, 273, 1591, 4975, 875, 274, 2025, 275, 1980, 276, 876, 877, 2066, 277, 278, 279, 4670, 280, 2323, 2288, 2334, 4939, 4689, 281, 878, 2416, 1892, 879, 1539, 2214, 2215, 880, 2327, 881, 882, 4601, 1295, 3601, 3877, 1930, 1420, 1678, 1460, 2306, 884, 282, 1799, 283, 284, 4988, 4871, 4553, 4772, 2260, 1626, 885, 286, 1374, 886, 2119, 2504, 2468, 287, 1620, 1290, 2425, 2482, 4564, 4671, 2282, 288, 1354, 2033, 289, 887, 290, 888, 291, 1956, 2362, 2467, 889, 2357, 4547, 4765, 292, 4794, 2391, 4324, 293, 890, 294, 295, 4138, 891, 2297, 2254, 296, 2224, 3903, 297, 892, 3829, 298, 299, 3809, 4271, 3844, 1436, 300, 1515, 1617, 301, 1961, 4649, 5010, 302, 2060, 303, 304, 305, 2452, 2147, 4574, 4538, 306, 2293, 1589, 893, 4946, 4370, 4841, 2342, 307, 308, 309, 894, 2246, 2155, 3646, 4059, 1431, 1331, 311, 4948, 312, 895, 1779, 313, 314, 315, 316, 896, 1558, 1552, 317, 2312, 318, 319, 897, 320, 898, 321, 322, 899, 1958, 2022, 2016, 900, 2454, 323, 2427, 2134, 324, 901, 325, 902, 326, 2373, 4803, 2459, 1491, 327, 328, 903, 2463, 2264, 329, 330, 1635, 4820, 905, 331, 4706, 4484, 1756, 906, 907, 4661, 2179, 4584, 4609, 332, 4907, 4635, 4529, 4683, 4561, 333, 3536, 2701, 2799, 3332, 3294, 3159, 3069, 2637, 3025, 2782, 3247, 3350, 2692, 2586, 3004, 3049, 2694, 2650, 3554, 2983, 3403, 3214, 3163, 2541, 3090, 3097, 3462, 1430, 2941, 3486, 2842, 3558, 3104, 3037, 3419, 2780, 2931, 1276, 2928, 2609, 3068, 3128, 2548, 2538, 2618, 2789, 3228, 2657, 3189, 2128, 2863, 3307, 3300, 2546, 3048, 3543, 2946, 2975, 3346, 3067, 2728, 2955, 3408, 3027, 3094, 3203, 2988, 2751, 2953, 2566, 2578, 2823, 3063, 3335, 3000, 3181, 3011, 3138, 3389, 2805, 3074, 2894, 3149, 2560, 3417, 3265, 3378, 2901, 2837, 2822, 2745, 3473, 3530, 3040, 2597, 3509, 3522, 3161, 2926, 3209, 3105, 3400, 2630, 2905, 2671, 2818, 2806, 2702, 2709, 2400, 3549, 3538, 2534, 2773, 2623, 3491, 3243, 3136, 2693, 3164, 3343, 2918, 2555, 2794, 2679, 3510, 3110, 2672, 3442, 2929, 3184, 3488, 2135, 4763, 3414, 3093, 2996, 3141, 3544, 3102, 2856, 2957, 3466, 3461, 2788, 2660, 3344, 3204, 2720, 3379, 2826, 1789, 2396, 2785, 3249, 3527, 4460, 3352, 2051, 2569, 4457, 2011, 4857, 2163, 4319, 3906, 1533, 1755, 1888, 4248, 1557, 3804, 1363, 1934, 1602, 1404, 4188, 1330, 4349, 3337, 3533, 2629, 3038, 2539, 3567, 3291, 3348, 3115, 3359, 2993, 3079, 3506, 2527, 2963, 2938, 2516, 3113, 1345, 2639, 3143, 3044, 2747, 3154, 3280, 3039, 2743, 2902, 3056, 2554, 2522, 3103, 3210, 3434, 2656, 4251, 4166, 4196, 3206, 3328, 2588, 3553, 2714, 3078, 3222, 3137, 3357, 2717, 2944, 3012, 3220, 3202, 2811, 3083, 3269, 3566, 2699, 2515, 3023, 2533, 3288, 3075, 3005, 2685, 3058, 2976, 2622, 3333, 3463, 2939, 3521, 3268, 3117, 2626, 2616, 3240, 2570, 3565, 2919, 3157, 2849, 3444, 2631, 3420, 2659, 3325, 3186, 2920, 3258, 3440, 3457, 3310, 2761, 3134, 2621, 3531, 2711, 2774, 2867, 2585, 3155, 2620, 3156, 2844, 3126, 3160, 2909, 3542, 3225, 2887, 3474, 3218, 2744, 2896, 3135, 3424, 3498, 3529, 2661, 2667, 2549, 2819, 2768, 2935, 3182, 2772, 3230, 3043, 2922, 3581, 3524, 2869, 2610, 3298, 2775, 3108, 2603, 3614, 2612, 2860, 3187, 3238, 3786, 4385, 3016, 3436, 2876, 2987, 3532, 3438, 3561, 3259, 2663, 2890, 3433, 3071, 3018, 2580, 2755, 3015, 2540, 3398, 2664, 2583, 2830, 2644, 2641, 3513, 2725, 2723, 3338, 3556, 2866, 2514, 2932, 2753, 2862, 2899, 2605, 2989, 3096, 3124, 2985, 2716, 3145, 3017, 2591, 2640, 3033, 1853, 3216, 3316, 3412, 2971, 3256, 3153, 3575, 3339, 2915, 2531, 3552, 3475, 3060, 3375, 2756, 3382, 2847, 2859, 3251, 3702, 3423, 2537, 2801, 3076, 2696, 3092, 3459, 3144, 3441, 2802, 3479, 2907, 3512, 3518, 3021, 2871, 3032, 2647, 2945, 3045, 2763, 3313, 3034, 3315, 3541, 2746, 2669, 2524, 3003, 2732, 3166, 3046, 3306, 2873, 3364, 3253, 3215, 3061, 2804, 2722, 2964, 2990, 2836, 4098, 4449, 3173, 2762, 3737, 2628, 3507, 2564, 3031, 2872, 3360, 2658, 2930, 2904, 3244, 3217, 3311, 3445, 2840, 3372, 2958, 3098, 3356, 3456, 3388, 2624, 3207, 2576, 2742, 2665, 2815, 3052, 3421, 2593, 3242, 2535, 2966, 2898, 2858, 2943, 2668, 2798, 3196, 2528, 2713, 3001, 2691, 2948, 2767, 2544, 3302, 2734, 2893, 2592, 2861, 3502, 2969, 2582, 3229, 2676, 2545, 3255, 3330, 2547, 3257, 2882, 3151, 3088, 2883, 3318, 2645, 2733, 2587, 3500, 3008, 2715, 2845, 3183, 2654, 3233, 3267, 2741, 2827, 2704, 3091, 2832, 2736, 3177, 3271, 2835, 2908, 3176, 2947, 3292, 3191, 2517, 3026, 3082, 3392, 3381, 2584, 2712, 3213, 3451, 2634, 3150, 2810, 3303, 2573, 3460, 2615, 3394, 2828, 3329, 4377, 4499, 3555, 2974, 3782, 3629, 3578, 3885, 2817, 3248, 2954, 3334, 3571, 3345, 3551, 3384, 3422, 1357, 1844, 2530, 2973, 4418, 4081, 3951, 1764, 1671, 1852, 334, 1843, 3449, 3185, 3399, 2786, 3055, 3472, 3397, 2601, 3564, 3277, 4373, 3548, 3179, 3407, 3841, 3347, 3142, 4255, 4431, 3241, 3077, 2700, 3147, 2648, 3283, 2829, 3278, 2581, 2536, 4363, 2848, 3410, 2797, 2523, 2520, 2721, 3496, 2571, 3198, 3219, 3030, 2673, 2921, 3837, 3301, 3322, 2705, 3239, 2949, 3369, 3396, 2892, 2897, 2766, 3174, 3297, 2550, 2889, 2933, 2793, 2627, 2677, 3119, 2596, 3226, 3172, 3089, 2868, 2839, 3942, 3120, 3286, 2843, 3465, 1564, 3946, 4222, 1504, 3999, 2682, 1875, 2865, 3539, 3168, 2864, 3308, 3557, 2940, 3109, 3503, 2625, 3455, 3114, 2595, 3331, 2978, 2518, 2521, 4079, 3024, 3573, 2952, 2653, 1769, 3180, 2813, 2652, 2600, 2816, 3201, 3188, 3270, 2997, 2992, 3009, 3520, 2936, 3275, 3165, 3447, 3131, 3305, 2809, 2792, 2729, 2814, 2619, 3266, 2825, 3066, 2857, 2998, 3064, 2681, 3035, 3279, 2764, 3480, 3127, 2912, 3010, 2607, 3211, 3111, 3041, 1573, 3909, 4269, 3487, 3489, 3019, 335, 1266, 1415, 2980, 3428, 3435, 3482, 3020, 2748, 2646, 2787, 2760, 2563, 3085, 3133, 3158, 3170, 2703, 3494, 2556, 2552, 3395, 3245, 3404, 2675, 2791, 2252, 4845, 1911, 4856, 2363, 908, 1935, 4711, 4728, 2460, 2749, 3341, 3355, 2575, 2942, 2886, 2758, 2594, 3495, 2884, 3516, 3042, 2737, 2923, 3563, 2855, 3476, 2611, 2937, 3383, 3497, 3402, 3162, 2662, 2875, 3223, 2878, 2079, 1808, 3285, 2757, 3057, 2951, 3519, 2579, 2853, 3387, 3401, 3493, 3393, 1608, 3365, 2885, 3574, 3081, 3007, 3568, 3152, 3367, 3358, 336, 2268, 3468, 3290, 3550, 3132, 2726, 2879, 3190, 3309, 2613, 2765, 3106, 1355, 3454, 2851, 2881, 3232, 3458, 3326, 3353, 2927, 3212, 2950, 3376, 3208, 3062, 3612, 3195, 3385, 2686, 2602, 3569, 3123, 2727, 1622, 2821, 2636, 2750, 2850, 3050, 2925, 3336, 3540, 2689, 3139, 2526, 3361, 3022, 3427, 3107, 3140, 3371, 3276, 2831, 3501, 2924, 3366, 3199, 3101, 3321, 3499, 2917, 2683, 2800, 2812, 3340, 3227, 3148, 3657, 4446, 1746, 1464, 1886, 2666, 3246, 3130, 3560, 3236, 2730, 3572, 1607, 3689, 2968, 1457, 1500, 337, 1184, 3450, 2577, 2567, 2532, 3415, 2934, 2984, 2568, 4147, 4943, 3002, 2986, 910, 2979, 2542, 2338, 2331, 2492, 1762, 4472, 1472, 1529, 2319, 4057, 4937, 2048, 4887, 1976, 4507, 1583, 338, 2078, 2372, 2102, 339, 911, 1711, 340, 912, 2013, 913, 2277, 914, 2403, 341, 915, 4902, 916, 342, 1594, 4440, 917, 343, 344, 4559, 918, 2439, 919, 345, 920, 346, 921, 922, 347, 2226, 348, 2180, 2298, 349, 350, 2099, 2036, 351, 4808, 923, 924, 4498, 1518, 3728, 3637, 3570, 3429, 4091, 2870, 2995, 4338, 3205, 2880, 3261, 1994, 3968, 4291, 4204, 4071, 4034, 1742, 2037, 352, 2820, 3912, 3287, 1218, 1190, 4145, 353, 2422, 354, 355, 925, 1782, 2184, 2261, 2490, 926, 927, 928, 4630, 2137, 3610, 356, 357, 4729, 358, 359, 4224, 1918, 1959, 1840, 3736, 1770, 929, 930, 931, 4155, 360, 361, 362, 932, 363, 364, 1279, 2289, 365, 1543, 366, 2156, 2472, 367, 4049, 1633, 1722, 368, 369, 1495, 1566, 370, 4967, 371, 372, 373, 1211, 1873, 2101, 2494, 1726, 374, 1442, 933, 1748, 4142, 1434, 1358, 1191, 3732, 4110, 4039, 4411, 4506, 4270, 4156, 3780, 4036, 4030, 4016, 1550, 3899, 1247, 1855, 1181, 3919, 1639, 3664, 1244, 4140, 3930, 4117, 4189, 4001, 3799, 3643, 3619, 1240, 1686, 1479, 1307, 1575, 4296, 1665, 3871, 4135, 1605, 4408, 3604, 1274, 4149, 1313, 3741, 1938, 3709, 1727, 3893, 1280, 3622, 1784, 3834, 1752, 1983, 1743, 3979, 4461, 4113, 3817, 4232, 1340, 1489, 4214, 3902, 1857, 2510, 2316, 1904, 1219, 1486, 1512, 1481, 1516, 3820, 3789, 4252, 4047, 4330, 4082, 4094, 1574, 1248, 4078, 1872, 1426, 3785, 3687, 4318, 4243, 3866, 3704, 4172, 1621, 4315, 1192, 1513, 1856, 2476, 3324, 2769, 2678, 1561, 3296, 375, 2348, 376, 377, 1395, 1584, 4093, 4453, 3940, 3778, 4374, 4210, 4009, 4264, 4339, 4368, 1738, 378, 1610, 4194, 4474, 4013, 4266, 1771, 1759, 1922, 3860, 3832, 1349, 1381, 3663, 1642, 1185, 4356, 3932, 1233, 4212, 3858, 1198, 4192, 3611, 1919, 1819, 3790, 3712, 1969, 4095, 1887, 4468, 1720, 4247, 934, 1790, 2002, 1657, 1663, 1336, 3894, 1554, 1494, 1405, 3576, 4314, 3695, 1851, 1850, 4362, 1815, 3845, 4511, 3656, 3638, 1406, 1596, 4454, 1443, 1661, 935, 4504, 1359, 1734, 3650, 1910, 1305, 1648, 3831, 4435, 1208, 1988, 4451, 1993, 1986, 3849, 1718, 4068, 1835, 1425, 1428, 1282, 4380, 1658, 1452, 1687, 4024, 379, 4072, 3791, 4491, 4323, 4014, 1304, 1440, 1511, 1981, 1676, 1547, 4422, 1283, 3861, 1383, 3644, 3691, 4259, 1749, 1418, 1176, 4216, 1387, 3992, 4423, 4253, 1618, 1871, 1256, 3748, 4119, 1297, 1586, 1251, 1299, 1954, 4450, 3990, 4029, 4097, 3890, 3796, 1389, 3711, 4344, 1578, 1476, 4343, 1202, 4413, 4384, 3808, 1647, 1475, 3892, 3674, 1739, 3926, 3595, 1943, 3756, 4405, 3973, 4109, 4159, 3744, 4387, 1960, 4275, 3781, 1535, 1210, 4492, 4365, 4118, 3655, 3886, 4278, 4383, 4485, 1392, 3751, 3931, 3986, 3678, 1249, 4353, 4208, 3710, 4238, 4213, 3969, 4436, 3175, 4128, 2970, 1228, 3534, 3437, 3406, 3641, 3639, 3954, 4335, 3995, 3582, 4475, 3784, 4470, 4010, 3802, 3941, 4427, 4396, 4348, 3587, 3818, 3864, 3956, 3863, 3731, 3814, 4067, 4354, 4350, 4334, 3821, 1932, 3929, 4171, 1258, 3824, 3631, 4465, 4494, 1320, 1398, 3828, 1204, 1223, 1284, 1685, 3773, 4209, 3014, 4462, 4246, 4190, 4312, 4023, 3760, 1178, 3884, 2783, 4038, 3545, 2916, 3112, 2834, 3880, 3673, 4102, 4399, 4048, 3752, 4207, 1235, 3943, 4355, 4087, 4100, 4327, 4037, 4163, 3918, 4486, 1243, 3933, 4178, 1662, 1643, 4152, 3634, 3617, 4445, 4303, 1370, 3838, 4199, 4284, 1213, 4382, 1399, 1187, 3714, 1828, 4487, 3615, 1842, 1501, 3746, 4018, 4420, 3606, 4121, 3724, 3935, 1941, 4419, 4282, 1955, 1949, 4310, 4488, 1577, 4127, 1288, 1171, 3670, 4052, 3627, 3777, 936, 1371, 3685, 1325, 1940, 380, 4482, 4258, 3812, 1581, 1860, 4124, 4508, 4500, 3652, 3972, 1309, 1630, 1528, 3717, 1217, 3692, 4430, 3764, 4316, 4285, 3645, 3971, 4421, 1172, 4026, 2740, 3125, 3546, 1206, 3842, 4404, 3690, 3962, 4513, 4340, 4329, 4410, 3703, 4136, 1763, 1487, 3589, 3907, 4153, 2707, 3730, 4426, 4180, 4041, 3923, 4444, 3851, 4429, 4361, 1441, 4394, 4302, 3758, 4510, 3742, 1868, 4077, 1710, 1939, 1335, 1666, 1407, 4187, 1193, 1188, 1196, 1724, 1717, 1200, 1646, 1997, 1975, 1701, 4280, 1613, 4006, 1984, 1351, 3653, 3833, 1593, 2561, 4442, 3900, 4298, 1761, 4388, 1820, 1597, 4317, 4249, 1341, 1203, 1680, 4441, 3628, 3725, 1945, 937, 4206, 1588, 1439, 3794, 4447, 1838, 3776, 3658, 4064, 1377, 4011, 4272, 4503, 1324, 1367, 3594, 3680, 1300, 1750, 938, 3913, 3774, 1877, 1987, 1862, 3998, 1380, 4185, 3686, 3696, 4463, 1350, 4008, 4230, 3853, 4244, 4083, 381, 1909, 3897, 1546, 382, 3613, 3273, 3452, 3525, 1229, 4105, 3835, 383, 1263, 1234, 3970, 1492, 3856, 3586, 1175, 4321, 4020, 4144, 1224, 1199, 3667, 2778, 4412, 4407, 1812, 1810, 3823, 1416, 1427, 1507, 1878, 4333, 3146, 4281, 4211, 1179, 3843, 1669, 1677, 1524, 1525, 1974, 384, 1979, 1456, 1239, 4167, 3740, 1876, 1388, 1967, 1474, 385, 1342, 1471, 4176, 1232, 1989, 4125, 1741, 1508, 1580, 4060, 4378, 1576, 1212, 1893, 3921, 3585, 1174, 1396, 4061, 4015, 1207, 3698, 3825, 3922, 4021, 4181, 1598, 1916, 1429, 4502, 4231, 1321, 4390, 3693, 3734, 1382, 3684, 1747, 3806, 3896, 3635, 1768, 4025, 3976, 3840, 3963, 4286, 1502, 3836, 4161, 3659, 3743, 4130, 3605, 1385, 1783, 4392, 4328, 1316, 4173, 4265, 1246, 1985, 1629, 1829, 1737, 3826, 1473, 1992, 1883, 1656, 1837, 1914, 1839, 1834, 3984, 4495, 3910, 4160, 3671, 4184, 4132, 4250, 1503, 1237, 1523, 1417, 4063, 1562, 3977, 1971, 1707, 1847, 1792, 3769, 4074, 1534, 4239, 4003, 3915, 1689, 1776, 1599, 1265, 1410, 1823, 1498, 1329, 939, 386, 387, 1655, 3874, 4261, 3626, 1791, 3579, 1644, 3936, 4054, 4260, 4359, 4131, 4297, 4357, 4022, 3770, 4046, 1222, 1996, 3788, 4169, 1925, 3953, 4228, 4226, 4277, 4101, 1889, 1369, 3797, 4088, 4019, 3771, 3632, 1402, 388, 1520, 1767, 1466, 1194, 4137, 1908, 1927, 1758, 3772, 3661, 4186, 4174, 1170, 3850, 1315, 1611, 1530, 1859, 2209, 4183, 1408, 1403, 941, 4033, 3623, 3596, 1461, 1848, 1173, 1928, 1459, 1765, 1826, 3719, 1931, 3584, 4004, 3591, 3967, 4168, 3957, 3878, 4165, 4191, 3980, 4058, 4200, 4336, 3958, 1260, 4051, 3798, 4032, 1774, 4322, 3991, 4106, 1641, 1570, 3978, 3965, 4464, 3813, 4154, 1365, 4257, 3846, 4345, 4379, 3603, 1693, 3937, 3801, 1787, 1214, 4483, 4201, 1898, 1845, 1226, 1220, 4245, 1347, 3867, 1900, 3640, 3916, 4089, 1209, 3745, 3988, 3975, 4236, 4075, 4146, 4256, 4308, 4000, 4148, 3588, 3868, 4403, 3883, 4326, 4393, 3895, 4237, 3955, 3727, 4005, 4092, 4372, 4283, 1553, 3805, 4151, 1281, 1681, 4489, 3982, 4437, 3597, 4342, 3872, 3987, 4490, 3876, 3668, 4300, 1679, 1242, 3598, 3583, 3647, 389, 4304, 3793, 3779, 1937, 1907, 4042, 3648, 3996, 3800, 4367, 4099, 1807, 3887, 4428, 1625, 1390, 1884, 1682, 4364, 4306, 3869, 1278, 1672, 942, 1505, 1542, 1709, 1915, 3600, 3914, 1968, 3948, 1670, 3811, 1865, 1362, 943, 1716, 3961, 1506, 4221, 1376, 944, 1683, 4276, 1445, 1721, 1632, 3607, 1328, 1455, 1913, 1497, 1317, 1951, 1778, 1379, 3768, 4225, 1668, 945, 390, 391, 4406, 4341, 1480, 392, 393, 394, 395, 1714, 1422, 396, 2043, 946, 2265, 397, 3618, 4433, 1177, 3898, 398, 2251, 947, 948, 2212, 949, 950, 399, 951, 400, 1965, 4640, 2345, 4471, 952, 953, 401, 2475, 403, 404, 4758, 954, 955, 2437, 4139, 1482, 3602, 4434, 3721, 1592, 1825, 1698, 1519, 1352, 4202, 4409, 1977, 1917, 405, 406, 407, 408, 956, 957, 2267, 1631, 1684, 409, 2054, 3889, 958, 410, 2117, 411, 959, 412, 960, 2443, 4712, 4619, 2285, 413, 414, 415, 961, 2352, 2417, 962, 1905, 416, 963, 417, 418, 2382, 3675, 1833, 3974, 419, 964, 420, 421, 965, 966, 967, 968, 2365, 969, 970, 422, 1897, 2056, 2309, 1272, 4754, 2207, 971, 423, 4133, 3830, 4865, 972, 424, 973, 425, 4955, 426, 974, 2109, 2380, 427, 1708, 4676, 428, 4141, 429, 430, 3749, 431, 1619, 975, 4044, 3590, 1944, 4126, 1923, 1706, 432, 976, 977, 978, 4867, 4400, 433, 434, 1606, 979, 435, 980, 2604, 2895, 981, 436, 3448, 4959, 4563, 2188, 437, 438, 2055, 1692, 982, 2388, 2243, 983, 2035, 2120, 4940, 439, 440, 441, 2474, 4900, 2052, 4764, 3862, 4055, 4358, 984, 2435, 4589, 2276, 2401, 985, 1664, 443, 2073, 2405, 986, 4309, 4045, 3854, 3682, 2491, 444, 445, 1972, 2688, 4366, 3425, 3231, 3649, 2759, 2724, 3873, 3755, 1216, 3599, 3775, 2754, 2606, 3471, 3234, 2565, 2803, 2562, 2684, 3411, 3405, 2690, 1255, 3694, 446, 3985, 3535, 1306, 4084, 3282, 447, 1353, 2168, 1780, 987, 988, 989, 2126, 448, 449, 2107, 450, 2031, 990, 451, 452, 991, 1485, 2242, 453, 2286, 992, 1728, 993, 4703, 994, 995, 454, 1696, 996, 2039, 997, 998, 3116, 1869, 456, 4759, 2500, 4798, 2262, 4562, 457, 1386, 999, 458, 4768, 4982, 4778, 2040, 1000, 4981, 3879, 2698, 459, 460, 1001, 461, 1447, 462, 1002, 2042, 2339, 1003, 463, 464, 4425, 1645, 465, 1004, 466, 2328, 467, 468, 469, 1231, 1468, 470, 471, 2496, 472, 473, 1005, 474, 2108, 4725, 1006, 476, 1273, 1007, 1744, 1488, 1659, 477, 478, 4598, 1604, 4753, 2493, 479, 1008, 1009, 1010, 1011, 1012, 1013, 1014, 481, 4313, 482, 483, 1499, 484, 1015, 4761, 2091, 2386, 2513, 1016, 4073, 1777, 2172, 485, 2205, 4592, 4545, 4720, 486, 1458, 4274, 2122, 4905, 4796, 2152, 4539, 4528, 4904, 4842, 4986, 4639, 4846, 4623, 4650, 4595, 2195, 4681, 487, 2182, 4710, 1775, 2083, 4205, 1526, 4586, 1697, 1017, 2000, 4692, 2480, 2017, 488, 2335, 489, 4969, 1894, 1882, 1817, 1880, 490, 1018, 3917, 3616, 4311, 1800, 4473, 4085, 4401, 1310, 3783, 3765, 1538, 3870, 491, 1948, 3699, 1735, 3792, 4290, 2074, 492, 5001, 2136, 493, 2211, 4532, 494, 2421, 495, 4090, 2378, 2210, 2247, 2478, 2047, 496, 4620, 4978, 1019, 2012, 1803, 3642, 497, 1322, 4752, 1020, 498, 1021, 2235, 2302, 2488, 4665, 4699, 4608, 4781, 499, 2049, 2404, 4685, 500, 501, 1022, 502, 1333, 503, 1023, 4686, 4804, 504, 4727, 505, 506, 4805, 2065, 1890, 1024, 507, 508, 509, 2110, 1025, 510, 1026, 3608, 1732, 511, 2397, 1864, 1816, 1531, 512, 513, 2451, 3636, 4892, 514, 1699, 4593, 1027, 4987, 515, 2495, 4660, 1028, 516, 1029, 2409, 1366, 2112, 2178, 2124, 2376, 5011, 4572, 4957, 4789, 4543, 4664, 4678, 4746, 2489, 4922, 2145, 1030, 4832, 4950, 1261, 4027, 3478, 3763, 2959, 1293, 2462, 517, 3197, 1595, 3413, 2067, 1031, 2228, 1448, 518, 4698, 4616, 2057, 2305, 2133, 2061, 4526, 4617, 1032, 1033, 2429, 2311, 1675, 1797, 519, 4578, 2271, 4693, 4604, 2466, 2148, 2420, 520, 4854, 2381, 2315, 2284, 4813, 521, 1034, 522, 523, 1999, 3759, 1215, 4122, 1730, 524, 525, 526, 3966, 4573, 5008, 1035, 527, 4973, 2508, 528, 3911, 529, 3289, 1821, 530, 531, 2426, 1036, 532, 1874, 533, 534, 1037, 1038, 536, 1039, 537, 538, 539, 1040, 3767, 1929, 1041, 1042, 3683, 2100, 4853, 2300, 2165, 540, 2105, 541, 4906, 542, 1338, 2292, 2021, 1616, 1901, 1796, 1517, 4331, 4332, 4466, 2719, 3803, 4123, 4233, 1824, 3129, 3087, 3505, 4158, 4254, 1449, 2121, 1044, 3720, 4351, 4414, 1673, 3453, 3254, 2501, 1649, 543, 544, 545, 546, 1045, 547, 2225, 4240, 3580, 4680, 1046, 548, 549, 1047, 550, 2598, 551, 552, 553, 3819, 1259, 4062, 1048, 554, 2841, 1049, 1050, 3515, 1433, 1323, 4301, 555, 556, 1051, 557, 558, 1052, 1053, 3738, 1567, 559, 1054, 1270, 3857, 1055, 2151, 560, 2175, 2089, 4514, 2198, 2193, 1257, 1238, 3662, 561, 2186, 1057, 562, 1058, 563, 4872, 2097, 2436, 564, 1059, 565, 566, 1060, 1061, 2231, 4203, 1899, 3981, 1062, 1303, 4116, 567, 1063, 568, 569, 570, 2367, 1946, 3620, 1064, 1514, 4002, 3679, 3964, 3707, 3666, 1348, 4273, 1804, 4497, 571, 1401, 4438, 1895, 1264, 572, 1912, 573, 3939, 4170, 4056, 1271, 1065, 1521, 1221, 1066, 1451, 1654, 3934, 4080, 4352, 574, 1700, 3739, 1565, 1419, 1811, 3950, 1690, 1397, 3716, 1569, 1437, 1674, 4337, 1285, 4268, 1183, 3726, 3881, 4134, 4347, 4012, 3938, 4066, 4198, 4416, 4164, 3630, 4229, 4292, 4193, 4325, 4375, 4371, 4432, 4215, 1753, 3944, 1409, 4195, 1729, 4223, 1540, 4455, 1068, 1069, 4512, 1723, 1070, 3750, 3633, 4070, 4104, 4162, 4235, 1863, 4346, 1881, 1071, 1814, 1572, 575, 4443, 3761, 1346, 1587, 1072, 3592, 576, 1891, 4469, 1275, 577, 1950, 1963, 4129, 1073, 1296, 1360, 1551, 3733, 4111, 3993, 4108, 3949, 1287, 1713, 1556, 1736, 1995, 1435, 1424, 1705, 1861, 1197, 1254, 4120, 1545, 4417, 1469, 1292, 2185, 1785, 1236, 4293, 1827, 3839, 3983, 4395, 1957, 578, 3928, 4295, 3715, 3855, 3609, 1990, 4076, 4175, 3927, 1757, 1650, 4299, 1773, 2004, 1267, 1364, 579, 1462, 1879, 4007, 3729, 3665, 3722, 1691, 1712, 1074, 1624, 1751, 1394, 3924, 3952, 580, 581, 2003, 1343, 2203, 1559, 1250, 1555, 2304, 582, 2395, 4114, 1818, 1075, 583, 1076, 1077, 1704, 4448, 584, 4882, 1078, 1079, 1786, 585, 3354, 1832, 586, 3432, 2891, 587, 588, 4583, 2505, 1903, 2077, 4936, 4658, 4830, 2446, 1080, 2278, 1081, 1082, 4459, 1083, 589, 1563, 1084, 2113, 590, 591, 1085, 2256, 592, 2308, 593, 594, 595, 4931, 2407, 1858, 597, 598, 1453, 2559, 2590, 2738, 4478, 4069, 1809, 1327, 4150, 3260, 3481, 3672, 3625, 2008, 4439, 3852, 3997, 1411, 599, 3847, 4993, 1268, 4050, 3377, 4424, 1496, 4143, 4493, 3492, 1962, 1412, 2455, 600, 2457, 2321, 1086, 601, 4017, 4477, 1794, 2483, 4776, 2291, 602, 4263, 3072, 2009, 2199, 1754, 1087, 1088, 3888, 603, 604, 4777, 2324, 605, 1368, 3827, 4103, 606, 607, 1089, 2220, 4549, 1090, 1571, 1091, 1438, 608, 1092, 609, 2320, 2069, 610, 611, 1093, 612, 1094, 3701, 4389, 613, 4897, 1603, 614, 1095, 2154, 5000, 615, 616, 2263, 1332, 1715, 4369, 1652, 1096, 617, 1541, 618, 1921, 1733, 1373, 1870, 619, 4218, 1798, 2387, 1097, 1098, 1099, 1100, 620, 1702, 621, 622, 4855, 4847, 2398, 2239, 1101, 1667, 1384, 623, 4745, 3700, 1788, 1600, 624, 2098, 625, 4550, 4721, 4960, 2473, 4792, 4675, 1102, 1423, 626, 2771, 627, 1339, 3875, 628, 629, 3070, 4565, 2118, 2015, 4818, 4860, 2557, 2795, 2906, 2103, 4869, 2029, 3299, 3118, 4932, 4838, 4901, 4908, 4996, 4779, 2377, 4657, 4646, 4875, 4627, 4515, 4876, 4965, 4605, 4576, 2028, 4985, 4799, 4850, 1103, 4757, 4747, 1614, 1947, 2237, 630, 631, 4997, 4618, 4479, 3766, 632, 1104, 1105, 4886, 1106, 2432, 4827, 633, 1107, 4530, 634, 2371, 1108, 4536, 635, 1813, 636, 2431, 4866, 4991, 4814, 4560, 4956, 637, 4555, 1109, 4633, 2213, 638, 639, 3706, 1110, 640, 1111, 641, 4581, 4893, 4831, 2481, 4644, 4734, 2190, 4881, 4837, 4888, 4648, 642, 4548, 4807, 4896, 4868, 2374, 1112, 4823, 2164, 1113, 3735, 3390, 1694, 3431, 2838, 3483, 3464, 3848, 2558, 3314, 3086, 3029, 2956, 3517, 2651, 2914, 2680, 2632, 3121, 3100, 3528, 3526, 3084, 4220, 3304, 2846, 1186, 3235, 2903, 3559, 2687, 3409, 3237, 2900, 2999, 3349, 3171, 2752, 3262, 3504, 3047, 4376, 3193, 3430, 2525, 2670, 2911, 3508, 2776, 2697, 3200, 2790, 3323, 2543, 2874, 2614, 3904, 3373, 3054, 2617, 4242, 3621, 2708, 4179, 4398, 3959, 4935, 1269, 3095, 1286, 3624, 4481, 1432, 3511, 2735, 4381, 3295, 1585, 2390, 1568, 1114, 1766, 3221, 2643, 2739, 643, 4735, 4629, 1115, 4918, 4688, 3920, 644, 4723, 4949, 4607, 4719, 1116, 645, 646, 4611, 2353, 4603, 4762, 4819, 2221, 4636, 4992, 2307, 647, 1801, 4279, 3762, 1637, 1509, 4843, 4797, 4590, 4516, 4541, 2200, 4580, 4858, 648, 649, 2477, 4724, 4551, 4674, 1118, 1119, 2965, 2369, 2695, 3293, 650, 651, 4862, 4722, 4944, 1120, 652, 1121, 4983, 4784, 4877, 653, 654, 1122, 3264, 655, 2076, 4849, 656, 657, 2447, 658, 659, 2191, 4035, 2910, 3391, 2808, 3099, 2913, 3676, 2852, 3284, 2731, 1609, 2375, 3537, 3994, 1319, 4467, 1802, 1227, 1623, 660, 4844, 4714, 4979, 4812, 2192, 1123, 661, 2364, 662, 663, 664, 1124, 1125, 665, 2487, 4899, 2138, 1126, 666, 667, 4569, 4917, 2322, 1127, 1128, 1129, 668, 669, 1130, 670, 1131, 1527, 1132, 671, 1772, 2314, 1133, 1134, 2470, 1135, 672, 2236, 4716, 673, 4600, 2196, 674, 2456, 4588, 4963, 4851, 4558, 4557, 4697, 4610, 4773, 4687, 4708, 4910, 2123, 1136, 1137, 2358, 5005, 2208, 4952, 4945, 1933, 1731, 1793, 675, 676, 3342, 1138, 1139, 677, 4840, 4597, 4870, 1140, 4990, 4954, 4916, 678, 1141, 4737, 4527, 2253, 4531, 679, 1142, 1143, 680, 4771, 1144, 4638, 681, 4705, 4525, 4898, 2325, 2415, 5004, 1145, 682, 683, 2141, 1146, 684, 685, 2445, 686, 687, 4861, 688, 3822, 689, 690, 4743, 691, 1147, 1601, 692, 1148, 693, 4537, 4825, 4625, 4621, 3905, 694, 695, 1414, 1149, 696, 2027, 2159, 4756, 4690, 4859, 4793, 4575, 2160, 4828, 4731, 4802, 4750, 1150, 2081, 2258, 697, 1795, 1372, 1695, 1866, 1151, 4115, 1719, 2280, 4662, 698, 2176, 2217, 1920, 699, 700, 701, 4999, 1544, 4739, 2512, 702, 703, 4031, 4305, 1636, 1393, 2010, 3810, 4452, 3677, 4227, 1277, 1400, 4402, 4157, 4197, 1337, 1253, 1532, 4028, 3989, 2449, 4715, 704, 2050, 1493, 1854, 1902, 1510, 1152, 2340, 4182, 706, 4652, 2442, 2484, 707, 708, 709, 4667, 1153, 2412, 4732, 4476, 2053, 710, 1375, 711, 712, 713, 4738, 4811, 4570, 1245, 714, 2045, 4707, 715, 2169, 4713, 1841, 4234, 4924, 1154, 1314, 4096, 2023, 717, 4895, 2414, 718, 1155, 719, 720, 2063, 1311, 4921, 721, 4833, 4903, 4885, 4666, 2249, 4217, 1156, 723, 1157, 1627, 2116, 2287, 1158, 2330, 4826, 4622, 4740, 724, 4700, 725, 1159, 5013, 4894, 726, 2434, 1953, 1160, 1201, 727, 3787, 2046, 1161, 728, 729, 2485, 2044, 4568, 3747, 2248, 730, 731, 1846, 2507, 2368, 1162, 2019, 2333, 3815, 2005, 2266, 1964, 2347, 732, 2177, 2059, 4958, 4927, 1822, 4815, 1262, 2094, 4480, 1537, 1291, 2419, 1318, 4628, 4294, 4926, 1582, 2162, 733, 4587, 734, 735, 3439, 2833, 4287, 4509, 4505, 4267, 3697, 3272, 4112, 2967, 3651, 1991, 1805, 1628, 3705, 2479, 736, 1195, 4863, 1163, 3859, 1164, 2394, 1165, 2355, 2351, 4835, 2259, 2275, 1166, 4968, 2423, 737, 1167, 4989, 4612, 2127, 1745, 1973, 4767, 1168, 2273, 2310, 3807, 4307, 1169, 2303, 1454, or 1781.

33. The VP capsid polypeptide of any one of claims 1-28, wherein:
(a) X³ of SEQ ID NO: 5014 is not E,
(b) X⁶ of SEQ ID NO: 5014 is not E, or
(c) X³ of SEQ ID NO: 5014 is not E and X⁶ of SEQ ID NO: 5014 is not E.

34. The VP capsid polypeptide of claim 33, wherein the 581 to 589 region of the VP capsid polypeptide has a sequence of any one of SEQ ID NOs: 2498, 4884, 738, 739, 4177, 1289, 740, 14, 15, 741, 742, 743, 16, 744, 17, 18, 745, 3477, 1548, 3051, 2982, 2171, 2877, 746, 19, 20, 3036, 3426, 3073, 3169, 747, 2406, 3362, 2784, 4889, 21, 3192, 4942, 22, 23, 1638, 748, 24, 25, 749, 26, 27, 1703, 1836, 28, 2038, 2301, 3660, 29, 750, 30, 31, 32, 2095, 1640, 33, 34, 35, 36, 37, 4742, 2450, 38, 4925, 39, 751, 752, 1653, 1205, 3795, 753, 4288, 4219, 2770, 2962, 4241, 4107, 2718, 3317, 4391, 4053, 3263, 2553, 3947, 2710, 2608, 3467, 2796, 2961, 2529, 3320, 2674, 2635, 3446, 3053, 3250, 3688, 1182, 1998, 4320, 3351, 2655, 3514, 2779, 3194, 3319, 3224, 3281, 3708, 2807, 3562, 3274, 3374, 3013, 3416, 2981, 3065, 2777, 3469, 2977, 2638, 2972, 3059, 2574, 3380, 4262, 3167, 3368, 2781, 3547, 3386, 1225, 2960, 3485, 3370, 3443, 2824, 754, 1467, 3327, 3178, 3006, 3252, 2991, 3470, 2888, 2572, 3418, 2642, 2519, 3363, 40, 2633, 41, 42, 43, 755, 2511, 44, 45, 756, 46, 757, 47, 48, 1952, 758, 2341, 2410, 49, 3122, 2551, 3718, 4806, 2216, 3484, 3577, 759, 2080, 2072, 2034, 50, 1308, 1230, 3960, 1378, 2994, 3080, 2589, 3681, 51, 4694, 2257, 52, 760, 53, 2389, 4934, 4951, 761, 4591, 762, 4659, 54, 2146, 3925, 55, 3654, 2087, 2346, 4766, 4682, 4984, 4744, 56, 763, 764, 4626, 4702, 57, 58, 59, 60, 61, 4086, 1740, 1660, 765, 766, 62, 1966, 2032, 2499, 2332, 767, 63, 2096, 2181, 4913, 64, 768, 769, 770, 2384, 2402, 771, 65, 66, 2111, 67, 772, 2458, 2197, 68, 3816, 69, 2599, 2706, 2497, 70, 2234, 2183, 2399, 71, 4769, 2366, 72, 73, 74, 3865, 1549, 1361, 2453, 3882, 773, 3713, 1942, 2140, 75, 1312, 4501, 76, 77, 774, 1413, 775, 776, 78, 1560, 4289, 3757, 79, 3593, 4043, 1806, 3908, 4397, 1615, 4415, 3723, 2006, 3754, 1470, 4360, 80, 3945, 2854, 3523, 3669, 1356, 777, 2132, 2379, 81, 82, 4065, 83, 84, 2030, 1294, 2413, 2064, 1484, 85, 4594, 86, 778, 87, 3891, 4456, 4040, 4496, 1982, 2001, 1478, 1189, 88, 1490, 1885, 1926, 89, 90, 91, 779, 2270, 780, 2161, 1180, 92, 781, 782, 783, 93, 2356, 784, 785, 786, 94, 95, 787, 788, 1831, 1867, 96, 4458, 97, 1970, 4656, 2173, 1936, 2349, 1590, 4585, 98, 99, 100, 789, 790, 1298, 101, 1688, 791, 792, 2007, 4556, 2070, 102, 793, 4632, 103, 794, 795, 104, 105, 106, 2229, 796, 4980, 4691, 107, 2440, 1849, 108, 2014, 797, 4736, 2509, 2018, 2227, 4787, 109, 1579, 110, 1906, 111, 2428, 798, 2075, 112, 2411, 113, 2359, 799, 4848, 800, 2461, 1444, 2313, 2350, 4579, 4821, 801, 114, 2329, 4834, 115, 1344, 116, 802, 117, 118, 119, 4929, 4677, 120, 2158, 121, 803, 804, 1463, 805, 122, 2139, 2290, 1760, 2465, 123, 2424, 2058, 2230, 124, 4717, 806, 125, 126, 2370, 127, 4521, 128, 4971, 4994, 807, 2085, 4533, 129, 130, 131, 132, 4933, 808, 2336, 2026, 2204, 809, 810, 2281, 133, 1978, 134, 811, 812, 135, 136, 137, 138, 813, 814, 139, 4673, 140, 815, 1326, 141, 142, 143, 2344, 4544, 5009, 144, 145, 816, 4654, 4816, 1634, 1302, 817, 146, 818, 147, 148, 149, 4546, 150, 151, 152, 153, 154, 155, 819, 820, 156, 2149, 157, 2295, 821, 158, 159, 160, 161, 4631, 2441, 162, 163, 164, 165, 166, 822, 167, 168, 169, 170, 171, 823, 172, 4613, 824, 1651, 173, 1483, 174, 175, 825, 176, 177, 178, 179, 4624, 2170, 4809, 4520, 180, 826, 827, 181, 828, 4695, 4911, 182, 4582, 4873, 4596, 2020, 183, 4641, 829, 184, 185, 2244, 4647, 186, 187, 188, 189, 190, 2114, 830, 191, 192, 193, 194, 2071, 4615, 2361, 195, 4852, 2187, 4914, 4947, 196, 1391, 197, 4534, 4726, 4788, 198, 199, 4920, 831, 2240, 2223, 200, 201, 202, 203, 2106, 2503, 4775, 204, 205, 832, 833, 206, 834, 2232, 2294, 207, 2166, 208, 209, 210, 835, 836, 1334, 837, 3901, 3312, 2649, 1301, 211, 212, 1450, 4386, 3028, 213, 1446, 214, 2206, 215, 1896, 1522, 3490, 838, 216, 2241, 217, 218, 4653, 219, 1612, 220, 221, 222, 839, 223, 4953, 2360, 840, 224, 4928, 4741, 225, 2088, 4751, 5007, 4542, 226, 227, 4890, 4519, 4883, 228, 4786, 229, 230, 231, 2393, 2448, 841, 842, 232, 233, 4782, 234, 4962, 2269, 843, 235, 844, 236, 237, 4930, 845, 846, 238, 847, 4704, 239, 848, 849, 2150, 850, 851, 852, 853, 1536, 240, 854, 241, 242, 243, 244, 245, 246, 247, 248, 4923, 2245, 4696, 855, 4634, 856, 249, 250, 251, 252, 253, 254, 255, 857, 2115, 4880, 2218, 256, 257, 258, 259, 858, 859, 260, 261, 860, 861, 862, 262, 4966, 863, 864, 263, 4749, 4970, 2296, 2318, 865, 2326, 264, 1241, 265, 266, 866, 1477, 267, 867, 4977, 268, 868, 269, 4668, 5002, 270, 869, 870, 271, 871, 872, 272, 4822, 4709, 873, 4655, 4972, 2392, 874, 1252, 273, 1591, 4975, 875, 274, 2025, 275, 1980, 276, 876, 877, 2066, 277, 278, 279, 4670, 280, 2323, 2288, 2334, 4939, 4689, 281, 878, 1892, 879, 1539, 2214, 2215, 880, 2327, 881, 882, 4601, 883, 1295, 3601, 3877, 1930, 1420, 1678, 1460, 2306, 884, 282, 1799, 283, 284, 4988, 4553, 4772, 4817, 2260, 285, 1626, 2082, 885, 286, 1374, 886, 2119, 2468, 287, 2408, 1620, 1290, 2425, 2482, 4564, 4671, 2282, 288, 2354, 1354, 2033, 289, 887, 290, 888, 291, 1956, 2362, 2467, 889, 2357, 4547, 4765, 292, 4794, 2391, 4324, 293, 890, 294, 295, 4138, 891, 2297, 2254, 296, 2224, 3903, 297, 892, 3829, 298, 299, 3809, 4271, 3844, 1436, 300, 1515, 1617, 4701, 2174, 301, 1961, 4649, 5010, 302, 303, 304, 305, 2452, 2147, 306, 2293, 1589, 893, 4370, 4841, 2342, 307, 308, 309, 894, 2246, 2155, 3646, 4059, 1431, 1331, 310, 311, 4836, 4948, 312, 895, 1779, 313, 314, 315, 316, 896, 1558, 1552, 317, 2312, 318, 319, 897, 320, 898, 321, 322, 899, 1958, 2022, 2016, 900, 2454, 323, 2427, 2134, 324, 901, 325, 902, 326, 2373, 4803, 2459, 1491, 327, 328, 903, 2463, 2264, 329, 330, 904, 1635, 4820, 905, 2506, 331, 4706, 2092, 4484, 1756, 906, 907, 4661, 2179, 4584, 4609, 332, 4907, 4635, 4529, 4683, 4523, 4561, 333, 2337, 3536, 2701, 2799, 3332, 3294, 3159, 3069, 2637, 3025, 2782, 3247, 3350, 2692, 2586, 3004, 3049, 2694, 2650, 3554, 2983, 3403, 3214, 3163, 2541, 3090, 3097, 3462, 1430, 2941, 3486, 2842, 3558, 3104, 3037, 3419, 2780, 2931, 1276, 2928, 2609, 3068, 3128, 2548, 2538, 2618, 2789, 3228, 2657, 3189, 2128, 2863, 3307, 3300, 2546, 3048, 3543, 2946, 2975, 3346, 3067, 2728, 2955, 3408, 3027, 3094, 3203, 2988, 2751, 2953, 2566, 2578, 2823, 3063, 3335, 3000, 3181, 3011, 3138, 3389, 2805, 3074, 2894, 3149, 2560, 3417, 3265, 3378, 2901, 2837, 2822, 2745, 3473, 3530, 3040, 2597, 3509, 3522, 3161, 2926, 3209, 3105, 3400, 2630, 2905, 2671, 2818, 2806, 2702, 2709, 2400, 3549, 3538, 2534, 2773, 2623, 3491, 3243, 3136, 2693, 3164, 3343, 2918, 2555, 2794, 2679, 3510, 3110, 2672, 3442, 2929, 3184, 3488, 2135, 4763, 3414, 3093, 2996, 3141, 3544, 3102, 2856, 2957, 3466, 3461, 2788, 2660, 3344, 3204, 2720, 3379, 2826, 1789, 2396, 2785, 3249, 3527, 4460, 3352, 2051, 2569, 4457, 2011, 4857, 2163, 4783, 4319, 3906, 1533, 1755, 1888, 4248, 1557, 2153, 3804, 1363, 1934, 1602, 1404, 4188, 1330, 4349, 3337, 3533, 2629, 3038, 2539, 3567, 3291, 3348, 3115, 3359, 2993, 3079, 3506, 2527, 2963, 2938, 2516, 3113, 1345, 2639, 3143, 3044, 2747, 3154, 3280, 3039, 2743, 2902, 3056, 2554, 2522, 3103, 3210, 3434, 2656, 4251, 4166, 4196, 3206, 3328, 2588, 3553, 2714, 3078, 3222, 3137, 3357, 2717, 2944, 3012, 3220, 3202, 2811, 3083, 3269, 3566, 2699, 2515, 3023, 2533, 3288, 3075, 3005, 2685, 3058, 2976, 2622, 3333, 3463, 2939, 3521, 3268, 3117, 2626, 2616, 3240, 2570, 3565, 2919, 3157, 2849, 3444, 2631, 3420, 2659, 3325, 3186, 2920, 3258, 3440, 3457, 3310, 2761, 3134, 2621, 3531, 2711, 2774, 2867, 2585, 3155, 2620, 3156, 2844, 3126, 3160, 2909, 3542, 3225, 2887, 3474, 3218, 2744, 2896, 3135, 3424, 3498, 3529, 2661, 2667, 2549, 2819, 2768, 2935, 3182, 2772, 3230, 3043, 2922, 3581, 3524, 2869, 2610, 3298, 2775, 3108, 2603, 3614, 2612, 2860, 3187, 3238, 3786, 4385, 3016, 3436, 2876, 2987, 3532, 3438, 3561, 3259, 2663, 2890, 3433, 3071, 3018, 2580, 2755, 3015, 2540, 3398, 2664, 2583, 2830, 2644, 2641, 3513, 2725, 2723, 3338, 3556, 2866, 2514, 2932, 2753, 2862, 2899, 2605, 2989, 3096, 3124, 2985, 2716, 3145, 3017, 2591, 2640, 3033, 1853, 3216, 3316, 3412, 2971, 3256, 3153, 3575, 3339, 2915, 2531, 3552, 3475, 3060, 3375, 2756, 3382, 2847, 2859, 3251, 3702, 3423, 2537, 2801, 3076, 2696, 3092, 3459, 3144, 3441, 2802, 3479, 2907, 3512, 3518, 3021, 2871, 3032, 2647, 2945, 3045, 2763, 3313, 3034, 3315, 3541, 2746, 2669, 2524, 3003, 2732, 3166, 3046, 3306, 2873, 3364, 3253, 3215, 3061, 2804, 2722, 2964, 2990, 2836, 4098, 4449, 3173, 2762, 3737, 2628, 3507, 2564, 3031, 2872, 3360, 2658, 2930, 2904, 3244, 3217, 3311, 3445, 2840, 3372, 2958, 3098, 3356, 3456, 3388, 2624, 3207, 2576, 2742, 2665, 2815, 3052, 3421, 2593, 3242, 2535, 2966, 2898, 2858, 2943, 2668, 2798, 3196, 2528, 2713, 3001, 2691, 2948, 2767, 2544, 3302, 2734, 2893, 2592, 2861, 3502, 2969, 2582, 3229, 2676, 2545, 3255, 3330, 2547, 3257, 2882, 3151, 3088, 2883, 3318, 2645, 2733, 2587, 3500, 3008, 2715, 2845, 3183, 2654, 3233, 3267, 2741, 2827, 2704, 3091, 2832, 2736, 3177, 3271, 2835, 2908, 3176, 2947, 3292, 3191, 2517, 3026, 3082, 3392, 3381, 2584, 2712, 3213, 3451, 2634, 3150, 2810, 3303, 2573, 3460, 2615, 3394, 2828, 3329, 4377, 4499, 3555, 2974, 3782, 3629, 3578, 3885, 2817, 3248, 2954, 3334, 3571, 3345, 3551, 3384, 3422, 1357, 1844, 2530, 2973, 4418, 4081, 3951, 1764, 1671, 1852, 334, 1843, 3449, 3185, 3399, 2786, 3055, 3472, 3397, 2601, 3564, 3277, 4373, 3548, 3179, 3407, 3841, 3347, 3142, 4255, 4431, 3241, 3077, 2700, 3147, 2648, 3283, 2829, 3278, 2581, 2536, 4363, 2848, 3410, 2797, 2523, 2520, 2721, 3496, 2571, 3198, 3219, 3030, 2673, 2921, 3837, 3301, 3322, 2705, 3239, 2949, 3369, 3396, 2892, 2897, 2766, 3174, 3297, 2550, 2889, 2933, 2793, 2627, 2677, 3119, 2596, 3226, 3172, 3089, 2868, 2839, 3942, 3120, 3286, 2843, 3465, 1564, 3946, 4222, 1504, 3999, 2682, 1875, 2865, 3539, 3168, 2864, 3308, 3557, 2940, 3109, 3503, 2625, 3455, 3114, 2595, 3331, 2978, 2518, 2521, 4079, 3024, 3573, 2952, 2653, 1769, 3180, 2813, 2652, 2600, 2816, 3201, 3188, 3270, 2997, 2992, 3009, 3520, 2936, 3275, 3165, 3447, 3131, 3305, 2809, 2792, 2729, 2814, 2619, 3266, 2825, 3066, 2857, 2998, 3064, 2681, 3035, 3279, 2764, 3480, 3127, 2912, 3010, 2607, 3211, 3111, 3041, 1573, 3909, 4269, 3487, 3489, 3019, 335, 1266, 1415, 2980, 3428, 2444, 3435, 3482, 3020, 2748, 2646, 2787, 2760, 2563, 3085, 3133, 3158, 3170, 2703, 3494, 2556, 2552, 3395, 3245, 3404, 2675, 2791, 2252, 4845, 1911, 4856, 2363, 908, 1935, 4711, 4728, 2460, 4517, 2749, 3341, 3355, 2575, 2942, 2886, 2758, 2594, 3495, 2884, 3516, 3042, 2737, 2923, 3563, 2855, 3476, 2611, 2937, 3383, 3497, 3402, 3162, 2662, 2875, 3223, 2878, 2079, 1808, 3285, 2757, 3057, 2951, 3519, 2579, 2853, 3387, 3401, 3493, 3393, 1608, 3365, 2885, 3574, 3081, 3007, 3568, 3152, 3367, 3358, 336, 2268, 3468, 3290, 3550, 3132, 2726, 2879, 3190, 3309, 2613, 2765, 3106, 1355, 3454, 2851, 2881, 3232, 3458, 3326, 3353, 2927, 3212, 2950, 3376, 3208, 3062, 3612, 3195, 3385, 2686, 2602, 3569, 3123, 2727, 1622, 2821, 2636, 2750, 2850, 3050, 2925, 3336, 3540, 2689, 3139, 2526, 3361, 3022, 3427, 3107, 3140, 3371, 3276, 2831, 3501, 2924, 3366, 3199, 3101, 3321, 3499, 2917, 2683, 2800, 2812, 3340, 3227, 3148, 3657, 4446, 1746, 1464, 1886, 2666, 3246, 3130, 3560, 3236, 2730, 3572, 1607, 3689, 2968, 1457, 1500, 909, 337, 1184, 3450, 2577, 2567, 2532, 3415, 2934, 2984, 2568, 4147, 3002, 2986, 910, 2979, 2542, 2338, 2492, 1762, 4472, 1472, 1529, 2319, 2131, 4057, 4937, 2048, 1976, 4507, 1583, 338, 2078, 2372, 339, 911, 1711, 340, 912, 2013, 913, 2277, 914, 2403, 341, 915, 4672, 4902, 916, 342, 1594, 4440, 917, 343, 344, 4559, 918, 2233, 919, 345, 920, 346, 921, 922, 347, 2226, 348, 2180, 2298, 349, 350, 2099, 2036, 351, 4808, 923, 924, 4498, 1518, 3728, 3637, 3570, 3429, 4091, 2870, 2995, 4338, 3205, 2880, 3261, 1994, 3968, 4291, 4204, 4071, 4034, 1742, 2037, 352, 2820, 3912, 3287, 1218, 1190, 4145, 353, 2422, 354, 355, 925, 1782, 2184, 2261, 2490, 926, 927, 928, 4630, 2137, 3610, 356, 357, 4729, 358, 359, 4224, 1918, 1959, 1840, 3736, 2471, 1770, 929, 930, 931, 4155, 360, 361, 362, 932, 363, 364, 1279, 2289, 365, 1543, 366, 2156, 2472, 367, 4049, 1633, 1722, 368, 369, 1495, 1566, 370, 4967, 371, 372, 373, 1211, 1873, 2101, 2494, 1726, 374, 1442, 933, 1748, 4142, 1434, 1358, 1191, 3732, 4110, 4039, 4411, 4506, 4270, 4156, 3780, 4036, 4030, 4016, 1550, 3899, 1247, 1855, 1181, 3919, 1639, 3664, 1244, 4140, 3930, 4117, 4189, 4001, 3799, 3643, 3619, 1240, 1686, 1479, 1307, 1575, 4296, 1665, 3871, 4135, 1605, 4408, 3604, 1274, 4149, 1313, 3741, 1938, 3709, 1727, 3893, 1280, 3622, 1784, 3834, 1752, 1983, 1743, 3979, 4461, 4113, 3817, 4232, 1340, 1489, 4214, 3902, 1857, 2510, 2316, 1904, 1219, 1486, 1512, 1481, 1516, 3820, 3789, 4252, 4047, 4330, 4082, 4094, 1574, 1248, 4078, 1872, 1426, 3785, 3687, 4318, 4243, 3866, 3704, 4172, 1621, 4315, 1192, 1513, 1856, 2476, 3324, 2769, 2678, 1561, 3296, 375, 2343, 376, 377, 1395, 1584, 4093, 4453, 3940, 3778, 4374, 4210, 4009, 4264, 4339, 4368, 1738, 378, 1610, 4194, 4474, 4013, 4266, 1771, 1759, 1922, 3860, 3832, 1349, 1381, 3663, 1642, 1185, 4356, 3932, 1233, 4212, 3858, 1198, 4192, 3611, 1919, 1819, 3790, 3712, 1969, 4095, 1887, 4468, 1720, 4247, 934, 1790, 2002, 1657, 1663, 1336, 3894, 1554, 1494, 1405, 3576, 4314, 3695, 1851, 1850, 4362, 1815, 3845, 4511, 3656, 3638, 1406, 1596, 4454, 1443, 1661, 935, 4504, 1359, 1734, 3650, 1910, 1305, 1648, 3831, 4435, 1208, 1988, 4451, 1993, 1986, 3849, 1718, 4068, 1835, 1425, 1428, 1282, 4380, 1658, 1452, 1687, 4024, 379, 4072, 3791, 4491, 4323, 4014, 1304, 1440, 1511, 1981, 1676, 1547, 4422, 1283, 3861, 1383, 3644, 3691, 4259, 1749, 1418, 1176, 4216, 1924, 1421, 3992, 4423, 4253, 1618, 1871, 1256, 3748, 4119, 1297, 1586, 1251, 1299, 1954, 4450, 3990, 4029, 4097, 3890, 3796, 1389, 3711, 4344, 1578, 1476, 4343, 1202, 4413, 4384, 3808, 1647, 1475, 3892, 3674, 1739, 3926, 3595, 1943, 3756, 4405, 3973, 4109, 4159, 3744, 4387, 1960, 4275, 3781, 1535, 1210, 4492, 4365, 4118, 3655, 3886, 4278, 4383, 4485, 1392, 3751, 3931, 3986, 3678, 1249, 4353, 4208, 3710, 4238, 4213, 3969, 4436, 3175, 4128, 2970, 1228, 3534, 3437, 3406, 3641, 3639, 3954, 4335, 3995, 3582, 4475, 3784, 4470, 4010, 3802, 3941, 4427, 4396, 4348, 3587, 3818, 3864, 3956, 3863, 3731, 3814, 4067, 4354, 4350, 4334, 3821, 1932, 3929, 4171, 1258, 3824, 3631, 4465, 4494, 1320, 1398, 3828, 1204, 1223, 1284, 1685, 3773, 4209, 3014, 4462, 4246, 4190, 4312, 4023, 3760, 3753, 1178, 3884, 2783, 4038, 3545, 2916, 3112, 2834, 3880, 3673, 4102, 4399, 4048, 3752, 4207, 1235, 3943, 4355, 4087, 4100, 4327, 4037, 4163, 3918, 4486, 1243, 3933, 4178, 1662, 1643, 4152, 3634, 3617, 4445, 4303, 1370, 3838, 4199, 4284, 1213, 4382, 1399, 1187, 3714, 1828, 4487, 3615, 1842, 1501, 3746, 4018, 4420, 3606, 4121, 3724, 3935, 1941, 4419, 4282, 1955, 1949, 4310, 4488, 1577, 4127, 1288, 1171, 3670, 4052, 3627, 3777, 936, 1371, 3685, 1325, 1940, 380, 4482, 4258, 3812, 1581, 1860, 4124, 4508, 4500, 3652, 3972, 1309, 1630, 1528, 3717, 1217, 3692, 4430, 3764, 4316, 4285, 3645, 3971, 4421, 1172, 4026, 2740, 3125, 3546, 1725, 1206, 3842, 4404, 3690, 3962, 4513, 4340, 4329, 4410, 3703, 4136, 1763, 1487, 3589, 3907, 4153, 2707, 3730, 4426, 4180, 4041, 3923, 4444, 3851, 4429, 4361, 1441, 4394, 4302, 3758, 4510, 3742, 1868, 4077, 1710, 1939, 1335, 1666, 1407, 4187, 1193, 1188, 1196, 1724, 1717, 1200, 1646, 1997, 1975, 1701, 4280, 1613, 4006, 1984, 1351, 3653, 3833, 1593, 2561, 4442, 3900, 4298, 1761, 4388, 1820, 1597, 4317, 4249, 1341, 1203, 1680, 4441, 3628, 3725, 1945, 937, 4206, 1588, 1439, 3794, 4447, 1838, 3776, 3658, 4064, 1377, 4011, 4272, 4503, 1324, 1367, 3594, 3680, 1300, 1750, 3913, 3774, 1877, 1987, 1862, 3998, 1380, 4185, 3686, 3696, 4463, 1350, 4008, 4230, 3853, 4244, 4083, 381, 1909, 3897, 1546, 382, 3613, 3273, 3452, 3525, 1229, 4105, 3835, 383, 1263, 1234, 3970, 1492, 3856, 3586, 1175, 4321, 4020, 4144, 1224, 1199, 3667, 2778, 4412, 4407, 1812, 1810, 3823, 1416, 1427, 1507, 1878, 4333, 3146, 4281, 4211, 1179, 3843, 1669, 1677, 1524, 1525, 1974, 384, 1979, 1456, 1239, 4167, 3740, 1876, 1388, 1967, 1474, 385, 1342, 1471, 4176, 1232, 1989, 4125, 1741, 1508, 1580, 4060, 4378, 1576, 1212, 1893, 3921, 3585, 1174, 1396, 4061, 4015, 1207, 3698, 3825, 3922, 4021, 4181, 1598, 1916, 1429, 4502, 4231, 1321, 4390, 3693, 3734, 1382, 3684, 1747, 3806, 3896, 3635, 1768, 4025, 3976, 3840, 3963, 4286, 1502, 3836, 4161, 3659, 3743, 4130, 3605, 1385, 1783, 4392, 4328, 1316, 4173, 4265, 1246, 1985, 1629, 1829, 1737, 3826, 1473, 1992, 1883, 1656, 1837, 1914, 1839, 1834, 3984, 4495, 3910, 4160, 3671, 4184, 4132, 4250, 1503, 1237, 1523, 1417, 4063, 1562, 3977, 1971, 1707, 1847, 1792, 3769, 4074, 1534, 4239, 4003, 3915, 1689, 1776, 1599, 1265, 1410, 1823, 1498, 1329, 939, 386, 940, 387, 1655, 3874, 4261, 3626, 1791, 3579, 1644, 3936, 4054, 4260, 4359, 4131, 4297, 4357, 4022, 3770, 4046, 1222, 1996, 3788, 4169, 1925, 3953, 4228, 4226, 4277, 4101, 1889, 1369, 3797, 4088, 4019, 3771, 3632, 1402, 388, 1520, 1767, 1466, 1194, 4137, 1908, 1927, 1758, 3772, 3661, 4186, 4174, 1170, 3850, 1315, 1611, 1530, 1859, 2209, 4183, 1408, 1403, 941, 4033, 3623, 3596, 1461, 1848, 1173, 1928, 1459, 1765, 1826, 3719, 1931, 3584, 4004, 3591, 3967, 4168, 3957, 3878, 4165, 4191, 3980, 4058, 4200, 4336, 3958, 1260, 4051, 3798, 4032, 1774, 4322, 3991, 4106, 1641, 1570, 3978, 3965, 4464, 3813, 4154, 1365, 4257, 3846, 4345, 4379, 3603, 1693, 3937, 3801, 1787, 1214, 4483, 4201, 1898, 1845, 1226, 1220, 4245, 1347, 3867, 1900, 3640, 3916, 4089, 1209, 3745, 3988, 3975, 4236, 4075, 4146, 4256, 4308, 4000, 4148, 3588, 3868, 4403, 3883, 4326, 4393, 3895, 4237, 3955, 3727, 4005, 4092, 4372, 4283, 1553, 3805, 4151, 1281, 1681, 4489, 3982, 4437, 3597, 4342, 3872, 3987, 4490, 3876, 3668, 4300, 1679, 1242, 3598, 3583, 3647, 389, 4304, 3793, 3779, 1937, 1907, 4042, 3648, 3996, 3800, 4367, 4099, 1807, 3887, 4428, 1625, 1390, 1884, 1682, 4364, 4306, 3869, 1278, 1672, 942, 1505, 1542, 1709, 1915, 3600, 3914, 1968, 3948, 1670, 3811, 1865, 1362, 943, 1716, 3961, 1506, 4221, 1376, 944, 1683, 4276, 1445, 1721, 1632, 3607, 1328, 1455, 1913, 1497, 1317, 1951, 1778, 1379, 3768, 4225, 1668, 2383, 945, 390, 391, 4406, 4341, 1480, 392, 393, 394, 395, 1714, 1422, 396, 2043, 946, 2265, 397, 3618, 4433, 1177, 3898, 398, 2251, 947, 948, 2212, 949, 950, 399, 951, 400, 1965, 4640, 2129, 2345, 4471, 952, 953, 402, 2475, 403, 404, 4758, 955, 2437, 4139, 1482, 3602, 4434, 3721, 1592, 1825, 1698, 1519, 1352, 4202, 4409, 1977, 1917, 405, 406, 407, 408, 956, 2272, 957, 2267, 1631, 1684, 409, 2054, 3889, 958, 410, 2117, 411, 959, 412, 960, 2443, 4712, 4619, 2285, 414, 415, 961, 2352, 2417, 962, 1905, 416, 963, 417, 418, 3675, 1833, 3974, 419, 964, 420, 421, 965, 966, 967, 968, 2365, 969, 970, 422, 1897, 2056, 2309, 4733, 1272, 4754, 2207, 971, 423, 4133, 3830, 4865, 972, 424, 973, 425, 2068, 4955, 426, 974, 427, 1708, 4676, 428, 4141, 430, 3749, 431, 1619, 975, 4044, 3590, 1944, 4126, 1923, 1706, 432, 976, 977, 978, 4867, 4400, 433, 434, 1606, 2143, 979, 435, 980, 2604, 2895, 981, 436, 3448, 4959, 4563, 2188, 437, 438, 1692, 982, 2388, 2433, 2243, 983, 2035, 2120, 4940, 439, 440, 441, 2474, 442, 2052, 4764, 3862, 4055, 4358, 984, 2435, 4589, 2276, 2401, 985, 1664, 443, 2073, 2405, 986, 4309, 4045, 3854, 3682, 2491, 444, 445, 1972, 2688, 4366, 3425, 3231, 3649, 2759, 2724, 3873, 3755, 1216, 3599, 3775, 2754, 2606, 3471, 3234, 2565, 2803, 2562, 2684, 3411, 3405, 2690, 1255, 3694, 446, 3985, 3535, 1306, 4084, 3282, 447, 1353, 2168, 1780, 987, 988, 989, 2126, 448, 449, 2107, 450, 2031, 990, 451, 452, 991, 1485, 2242, 453, 2286, 992, 1728, 993, 4703, 994, 995, 454, 1696, 996, 2039, 455, 997, 998, 3116, 1869, 456, 4759, 2500, 4798, 2262, 4562, 457, 1386, 999, 458, 4768, 4982, 4778, 2040, 1000, 4981, 3879, 2698, 459, 460, 1001, 461, 1447, 462, 1002, 2042, 2339, 1003, 463, 464, 4425, 1645, 465, 1004, 467, 468, 469, 1231, 1468, 470, 471, 2496, 472, 473, 1005, 474, 475, 2108, 4725, 1006, 476, 1273, 1007, 1744, 1488, 1659, 477, 478, 4598, 1604, 4753, 2493, 479, 1008, 1009, 480, 1010, 1011, 1012, 1013, 1014, 481, 4313, 482, 483, 1499, 484, 1015, 4761, 2091, 2513, 1016, 4073, 1777, 2172, 485, 2205, 4592, 4545, 4720, 486, 1458, 4274, 2122, 4905, 5003, 4599, 4796, 2152, 4539, 4528, 4904, 4842, 4986, 4639, 4846, 4623, 4650, 4595, 2195, 4681, 2142, 487, 2182, 4710, 1775, 2083, 4205, 1526, 4586, 4602, 4518, 1697, 1017, 2000, 4692, 4795, 2480, 488, 2335, 489, 4969, 1894, 1882, 1817, 1880, 490, 1018, 3917, 3616, 4311, 1800, 4473, 4085, 4401, 1310, 3783, 3765, 1538, 3870, 491, 1948, 3699, 1735, 3792, 4290, 2074, 492, 2202, 5001, 2136, 493, 2211, 4532, 494, 2421, 495, 4090, 2378, 2104, 2210, 2247, 2478, 2047, 496, 4620, 4978, 4614, 1019, 2012, 1803, 3642, 497, 1322, 1020, 498, 1021, 2235, 2302, 2488, 4665, 4540, 5006, 499, 2049, 2404, 4685, 500, 501, 1022, 502, 1333, 503, 1023, 4686, 4804, 504, 4727, 505, 506, 4938, 4805, 2065, 1890, 4891, 1024, 507, 508, 509, 1025, 510, 1026, 3608, 1732, 511, 2397, 1864, 1816, 1531, 512, 513, 2451, 3636, 5012, 4892, 514, 1699, 4593, 1027, 4987, 515, 2495, 4660, 1028, 516, 1029, 2409, 1366, 2112, 2178, 2124, 2376, 5011, 4572, 4957, 4789, 4543, 4664, 4678, 2093, 4746, 2489, 4922, 2145, 1030, 4832, 4950, 1261, 4027, 3478, 3763, 2959, 1293, 2462, 517, 3197, 1595, 3413, 2238, 1031, 2228, 1448, 518, 2057, 2305, 2133, 2061, 4526, 4617, 1033, 2429, 2311, 1675, 4785, 1797, 519, 4578, 2271, 2466, 2148, 2420, 520, 4854, 2381, 2315, 2284, 4813, 521, 1034, 522, 523, 1999, 3759, 1215, 4122, 1730, 524, 525, 526, 3966, 4573, 5008, 1035, 527, 4973, 2508, 528, 3911, 529, 3289, 1821, 530, 531, 2426, 1036, 532, 1874, 533, 534, 1037, 535, 1038, 536, 1039, 537, 538, 539, 1040, 3767, 1929, 1041, 1042, 3683, 2100, 4853, 2300, 2165, 540, 541, 1043, 4906, 542, 1338, 2292, 2021, 1616, 1901, 1796, 1517, 4331, 4332, 4466, 2719, 3803, 4123, 4233, 1824, 3129, 3087, 3505, 4158, 4254, 1449, 2121, 1044, 3720, 4351, 4414, 1673, 3453, 3254, 2501, 1649, 543, 544, 545, 546, 1045, 547, 2084, 4240, 3580, 4680, 1046, 548, 2062, 1047, 550, 2598, 551, 552, 553, 3819, 1259, 4062, 1048, 554, 2841, 1049, 1050, 3515, 2219, 1433, 1323, 4301, 555, 556, 1051, 557, 558, 1052, 1053, 3738, 1567, 559, 1054, 1270, 3857, 1055, 2151, 560, 2175, 2089, 1056, 2198, 2193, 1257, 1238, 3662, 561, 2186, 1057, 4637, 562, 1058, 563, 4872, 2097, 564, 1059, 565, 566, 1060, 1061, 2231, 4203, 1899, 3981, 1062, 1303, 4116, 567, 1063, 568, 569, 570, 2367, 1946, 3620, 1064, 1514, 4002, 3679, 3964, 3707, 3666, 1348, 4273, 1804, 4497, 571, 1401, 4438, 1895, 1264, 572, 1912, 573, 3939, 4170, 4056, 1271, 1065, 1521, 1221, 1066, 1451, 1654, 1067, 3934, 4080, 4352, 574, 1700, 3739, 1565, 1419, 1811, 3950, 1690, 1397, 3716, 1569, 1465, 1437, 1674, 4337, 1285, 4268, 1183, 3726, 3881, 4134, 4347, 4012, 3938, 4066, 4198, 4416, 4164, 3630, 4229, 4292, 4193, 4325, 4375, 4371, 4432, 4215, 1753, 3944, 1409, 4195, 1729, 4223, 1540, 4455, 1068, 1069, 4512, 1723, 1070, 3750, 3633, 4070, 4104, 4162, 4235, 1863, 4346, 1881, 1814, 1572, 2418, 575, 4443, 3761, 1346, 1587, 1072, 3592, 576, 1891, 4469, 2430, 1275, 577, 1950, 1963, 4129, 1073, 1296, 1360, 1551, 3733, 4111, 3993, 4108, 3949, 1287, 1713, 1556, 1736, 1995, 1435, 1424, 1830, 1705, 1861, 1197, 1254, 4120, 1545, 4417, 1469, 1292, 2279, 1785, 1236, 4293, 1827, 3839, 3983, 4395, 1957, 2222, 578, 3928, 4295, 3715, 3855, 3609, 1990, 4076, 4175, 3927, 1757, 1650, 4299, 1773, 2004, 1267, 1364, 579, 1462, 1879, 4007, 3729, 3665, 3722, 1691, 1712, 1074, 1624, 1751, 1394, 3924, 3952, 580, 581, 2003, 1343, 2203, 1559, 1250, 1555, 2304, 582, 2395, 4114, 1818, 1075, 583, 1076, 1077, 1704, 4448, 584, 4882, 1078, 1079, 1786, 585, 3354, 1832, 586, 3432, 2891, 587, 588, 4583, 2505, 1903, 2077, 4936, 4658, 4830, 2446, 1080, 2278, 1081, 1082, 4459, 1083, 589, 1563, 1084, 2255, 2113, 590, 591, 1085, 2256, 592, 2308, 593, 594, 2274, 595, 4931, 2407, 1858, 596, 597, 598, 1453, 2559, 2590, 2738, 4478, 4069, 1809, 1327, 4150, 3260, 3481, 3672, 3625, 2008, 4439, 3852, 3997, 1411, 599, 3847, 4993, 1268, 4050, 3377, 4424, 1496, 4143, 4493, 3492, 1962, 1412, 2455, 600, 2457, 2321, 1086, 601, 4017, 4477, 1794, 2483, 4776, 2291, 602, 4263, 3072, 2009, 2199, 1754, 1087, 1088, 3888, 603, 604, 4777, 2324, 605, 1368, 3827, 4103, 606, 607, 1089, 2220, 4549, 1090, 1571, 1091, 1438, 608, 1092, 609, 610, 611, 1093, 612, 1094, 3701, 4389, 613, 4897, 1603, 614, 1095, 2154, 5000, 615, 616, 2263, 1332, 1715, 4369, 1652, 1096, 617, 1541, 618, 1921, 1733, 1373, 1870, 619, 4218, 1798, 2387, 1097, 1098, 1099, 1100, 620, 1702, 621, 622, 4801, 2398, 2239, 1101, 1667, 1384, 623, 4745, 3700, 1788, 1600, 624, 2098, 625, 4550, 4721, 4960, 4878, 2473, 4792, 4675, 1102, 1423, 626, 2771, 627, 1339, 3875, 628, 629, 3070, 4565, 2118, 4818, 4860, 2557, 2795, 2906, 2103, 4869, 2029, 3299, 3118, 4932, 4838, 4901, 2377, 4657, 4646, 4875, 4627, 4515, 4876, 4965, 4605, 4576, 2028, 4985, 4799, 4850, 1103, 4747, 1614, 1947, 2237, 630, 631, 4618, 4479, 3766, 632, 1104, 1105, 4886, 1106, 2432, 4827, 633, 1107, 4530, 634, 2371, 4651, 1108, 4536, 635, 1813, 636, 2431, 4866, 4991, 4814, 4560, 4956, 637, 4555, 1109, 4941, 4577, 2213, 638, 639, 3706, 1110, 640, 1111, 641, 4581, 4893, 4831, 2481, 4644, 4734, 2190, 4524, 4881, 4837, 4888, 4648, 642, 4548, 4807, 4896, 4868, 2374, 1112, 4823, 2164, 1113, 3735, 3390, 1694, 3431, 2838, 3483, 3464, 3848, 2558, 3314, 3086, 3029, 2956, 3517, 2651, 2914, 2680, 2632, 3121, 3100, 3528, 3526, 3084, 4220, 3304, 2846, 1186, 3235, 2903, 3559, 2687, 3409, 3237, 2900, 2999, 3349, 3171, 2752, 3262, 3504, 3047, 4376, 3193, 3430, 2525, 2670, 2911, 3508, 2776, 2697, 3200, 2790, 3323, 2543, 2874, 2614, 3904, 3373, 3054, 2617, 4242, 3621, 2708, 4179, 4398, 3959, 4935, 1269, 3095, 1286, 3624, 4481, 1432, 3511, 2735, 4381, 3295, 1585, 2390, 1568, 1114, 1766, 3221, 2643, 2739, 643, 4735, 4760, 1115, 4918, 4688, 3920, 644, 4723, 4949, 4748, 4607, 4719, 1116, 645, 646, 4611, 2353, 4645, 4998, 2307, 647, 1801, 4279, 3762, 1637, 1509, 4843, 4797, 4590, 4516, 4995, 4541, 2200, 4580, 4858, 648, 649, 2502, 1117, 4780, 4800, 4551, 4674, 1118, 1119, 2965, 2369, 2695, 3293, 650, 651, 4730, 4862, 4722, 4944, 1120, 652, 1121, 4983, 4784, 4877, 4643, 653, 654, 4909, 1122, 3264, 655, 2076, 4849, 656, 657, 2447, 658, 659, 2191, 4035, 2910, 3391, 2808, 3099, 2913, 3676, 2852, 3284, 2731, 1609, 2375, 2201, 3537, 3994, 1319, 4467, 1802, 1227, 1623, 660, 4844, 2086, 4770, 2192, 1123, 661, 2364, 662, 663, 664, 1124, 1125, 665, 2487, 4899, 2138, 1126, 666, 667, 4569, 4554, 4917, 2322, 1127, 1128, 1129, 668, 669, 1130, 670, 1131, 1527, 1132, 671, 1772, 2314, 1133, 1134, 2470, 1135, 672, 2236, 4716, 673, 4600, 2196, 674, 2456, 4606, 4910, 2123, 1136, 1137, 2358, 5005, 2208, 4952, 4945, 1933, 1731, 1793, 675, 676, 3342, 1138, 1139, 677, 4840, 4597, 4870, 1140, 4990, 4954, 4916, 678, 1141, 4737, 4527, 2253, 4531, 679, 1142, 1143, 680, 4771, 1144, 4638, 681, 4705, 4525, 4522, 4898, 2325, 2415, 5004, 1145, 682, 683, 1146, 684, 685, 2445, 686, 687, 4861, 2157, 688, 3822, 689, 690, 4743, 691, 1147, 1601, 692, 1148, 693, 4537, 4825, 4625, 4621, 3905, 694, 695, 1414, 1149, 696, 2027, 2159, 4756, 4793, 4575, 2160, 4828, 4731, 4718, 4802, 4750, 1150, 2081, 2258, 697, 1795, 1372, 1695, 1866, 1151, 4115, 1719, 2280, 4662, 698, 2176, 2194, 2217, 1920, 699, 700, 701, 4999, 1544, 4739, 2512, 702, 703, 4031, 4305, 1636, 1393, 2010, 3810, 4452, 3677, 4227, 1277, 1400, 4402, 4157, 4197, 1337, 1253, 1532, 4028, 3989, 2449, 4715, 704, 2050, 1493, 1854, 1902, 1510, 1152, 4824, 705, 2340, 4182, 706, 4652, 2442, 2484, 707, 708, 709, 4667, 1153, 2412, 4476, 2053, 710, 1375, 711, 712, 713, 4829, 4738, 4811, 4570, 4961, 1245, 714, 2045, 4707, 715, 2169, 4713, 4879, 1841, 4234, 4924, 1154, 1314, 4096, 2023, 716, 717, 4895, 2414, 718, 1155, 719, 720, 2063, 1311, 4921, 721, 4642, 722, 4885, 4666, 2249, 4217, 1156, 723, 1157, 1627, 2116, 4566, 2287, 1158, 2330, 4826, 4622, 4740, 724, 4700, 725, 1159, 5013, 4894, 726, 2434, 1953, 1160, 1201, 727, 3787, 2046, 1161, 728, 729, 2485, 2044, 4568, 3747, 730, 731, 2024, 1846, 2507, 2368, 2019, 2333, 3815, 2005, 2266, 1964, 2347, 2385, 732, 2177, 2059, 4958, 1822, 4815, 1262, 2094, 4480, 1537, 1291, 2419, 1318, 2283, 4976, 4294, 2486, 4926, 1582, 2162, 733, 4587, 734, 735, 3439, 2833, 4287, 4509, 4505, 4267, 3697, 3272, 4112, 2967, 3651, 1991, 1805, 1628, 3705, 2479, 736, 1195, 4863, 1163, 3859, 1164, 2394, 1165, 2355, 2351, 4679, 4835, 2259, 4839, 4571, 2275, 1166, 4968, 2250, 4912, 2423, 737, 1167, 4989, 4684, 4669, 4552, 4612, 2127, 1745, 1973, 4767, 1168, 2273, 2310, 3807, 4307, 1169, 2303, 1454, or 1781.

35. The VP capsid polypeptide of claim 33, wherein the 581 to 589 region of the VP capsid polypeptide has a sequence of any one of SEQ ID NOs: 2498, 4884, 738, 739, 4177, 1289, 740, 14, 15, 741, 742, 743, 16, 744, 17, 18, 745, 3477, 1548, 3051, 2982, 2171, 2877, 746, 19, 20, 3036, 3426, 3073, 3169, 747, 2406, 3362, 2784, 2469, 4889, 21, 3192, 4942, 22, 23, 1638, 748, 24, 25, 749, 26, 27, 1703, 1836, 28, 2038, 2301, 3660, 29, 750, 30, 31, 32, 2095, 1640, 33, 35, 36, 37, 4742, 2450, 38, 4925, 39, 751, 752, 2144, 1653, 1205, 3795, 753, 4288, 4219, 2770, 2962, 4241, 4107, 2718, 3317, 4391, 4053, 3263, 2553, 3947, 2710, 2608, 3467, 2796, 2961, 2529, 3320, 2674, 2635, 3446, 3053, 3250, 3688, 1182, 1998, 4320, 3351, 2655, 3514, 2779, 3194, 3319, 3224, 3281, 3708, 2807, 3562, 3274, 3374, 3013, 3416, 2981, 3065, 2777, 3469, 2977, 2638, 2972, 3059, 2574, 3380, 4262, 3167, 3368, 2781, 3547, 3386, 1225, 2960, 3485, 3370, 3443, 2824, 754, 1467, 3327, 3178, 3006, 3252, 2991, 3470, 2888, 2572, 3418, 2642, 2519, 3363, 40, 2633, 41, 42, 43, 755, 2511, 44, 45, 756, 46, 757, 47, 48, 1952, 758, 2341, 2410, 49, 3122, 2551, 3718, 4806, 2216, 3484, 3577, 759, 2080, 50, 1308, 1230, 3960, 1378, 2994, 3080, 2589, 3681, 51, 4694, 2257, 2167, 52, 760, 53, 2389, 4934, 4951, 4755, 761, 762, 4659, 54, 2146, 3925, 55, 3654, 2087, 2346, 4766, 4682, 4984, 4744, 56, 763, 764, 4626, 4702, 58, 59, 60, 61, 4086, 1740, 1660, 765, 766, 62, 1966, 2032, 2499, 2332, 767, 63, 2096, 2181, 4913, 2438, 2041, 64, 768, 769, 770, 2384, 2402, 771, 65, 66, 2111, 67, 772, 2458, 2197, 68, 3816, 69, 2599, 2706, 2497, 70, 2234, 2183, 2399, 71, 4769, 2366, 72, 73, 74, 3865, 1549, 1361, 2453, 3882, 773, 3713, 1942, 75, 1312, 4501, 76, 77, 774, 1413, 775, 776, 78, 1560, 4289, 3757, 79, 3593, 4043, 1806, 3908, 4397, 1615, 4415, 3723, 2006, 3754, 1470, 4360, 80, 3945, 2854, 3523, 3669, 1356, 777, 2132, 2379, 82, 4065, 83, 84, 2030, 1294, 2413, 2064, 1484, 2299, 85, 4594, 86, 778, 87, 3891, 4456, 4040, 4496, 1982, 2001, 1478, 1189, 88, 1490, 1885, 1926, 89, 90, 91, 779, 2270, 780, 2161, 1180, 92, 781, 782, 783, 93, 2356, 784, 785, 786, 94, 95, 787, 788, 1831, 1867, 96, 4458, 97, 1970, 4656, 2173, 1936, 2349, 1590, 4585, 98, 99, 100, 789, 790, 1298, 101, 1688, 791, 792, 2007, 2070, 102, 793, 4632, 103, 794, 795, 104, 105, 106, 2229, 796, 4980, 4691, 107, 2440, 1849, 108, 2014, 797, 4736, 2509, 2018, 2227, 4787, 109, 1579, 110, 1906, 111, 2428, 798, 112, 2411, 113, 2359, 799, 4848, 800, 2461, 1444, 2313, 2350, 4579, 4821, 801, 114, 2329, 4864, 4834, 115, 1344, 116, 802, 117, 118, 119, 4929, 4677, 120, 4791, 2158, 121, 803, 804, 1463, 805, 122, 2139, 2290, 1760, 2465, 2424, 2058, 2230, 124, 4717, 806, 125, 126, 2370, 127, 4521, 128, 4971, 4994, 807, 2085, 129, 130, 131, 132, 4933, 808, 2336, 2026, 2204, 809, 810, 2281, 133, 1978, 134, 811, 812, 135, 136, 137, 138, 813, 814, 139, 4673, 140, 815, 1326, 141, 142, 143, 2344, 4544, 144, 145, 816, 4654, 2125, 4663, 4810, 4816, 1634, 1302, 817, 146, 818, 147, 148, 149, 4546, 150, 151, 152, 153, 154, 155, 819, 820, 156, 2149, 157, 2295, 821, 158, 159, 160, 161, 4631, 2441, 162, 163, 164, 165, 166, 822, 167, 168, 169, 170, 171, 823, 172, 4613, 824, 1651, 173, 1483, 174, 175, 825, 176, 177, 178, 179, 4624, 2170, 4809, 4520, 180, 826, 827, 181, 828, 4695, 2130, 4911, 182, 4582, 4873, 4596, 2020, 2189, 183, 4641, 829, 184, 185, 2244, 4647, 186, 187, 188, 189, 190, 2114, 830, 191, 192, 193, 194, 2071, 4615, 2361, 195, 4852, 2187, 4914, 4947, 196, 1391, 197, 4534, 4726, 4788, 198, 199, 4920, 831, 2240, 2223, 200, 201, 202, 203, 2106, 2503, 4775, 204, 205, 832, 833, 206, 834, 2232, 2294, 207, 2166, 208, 209, 210, 835, 836, 1334, 837, 3901, 3312, 2649, 1301, 211, 212, 1450, 4386, 3028, 213, 1446, 214, 2206, 215, 1896, 1522, 3490, 838, 216, 2090, 2241, 217, 218, 4653, 219, 1612, 220, 221, 222, 839, 223, 4953, 4974, 4790, 4915, 2464, 4567, 4774, 4964, 2360, 840, 224, 4928, 4741, 225, 2088, 4751, 5007, 4542, 226, 227, 4890, 4519, 4883, 228, 4786, 229, 230, 231, 2393, 2448, 841, 842, 232, 233, 4782, 234, 4962, 2269, 843, 235, 844, 236, 237, 4930, 845, 846, 238, 847, 4704, 239, 848, 849, 2150, 850, 851, 852, 853, 1536, 240, 854, 241, 242, 243, 244, 245, 246, 247, 248, 4923, 2245, 4696, 855, 4634, 856, 249, 250, 251, 252, 253, 254, 255, 857, 2115, 4880, 256, 257, 258, 259, 858, 859, 260, 261, 860, 861, 862, 262, 4966, 863, 864, 263, 4749, 4970, 2296, 2318, 4535, 865, 2326, 264, 1241, 265, 266, 866, 1477, 267, 867, 4977, 268, 868, 269, 4668, 5002, 270, 869, 870, 271, 871, 872, 272, 4822, 4709, 873, 4655, 4972, 2392, 2317, 874, 1252, 273, 1591, 4975, 875, 274, 2025, 275, 1980, 276, 876, 877, 2066, 277, 278, 279, 4670, 280, 2323, 2288, 2334, 4689, 281, 878, 2416, 1892, 879, 1539, 2214, 2215, 880, 2327, 881, 882, 4601, 883, 1295, 3601, 3877, 1930, 1420, 1678, 1460, 2306, 884, 282, 1799, 283, 284, 4988, 4871, 4553, 4772, 4817, 2260, 285, 1626, 2082, 885, 286, 1374, 886, 2119, 2504, 2468, 287, 1620, 1290, 2425, 2482, 4671, 2282, 288, 2354, 1354, 2033, 289, 887, 290, 888, 291, 1956, 2467, 889, 2357, 4547, 4765, 292, 4794, 2391, 4324, 890, 294, 295, 4138, 891, 2297, 296, 2224, 3903, 297, 892, 3829, 298, 299, 3809, 4271, 3844, 1436, 300, 1515, 1617, 4701, 2174, 301, 1961, 4649, 5010, 302, 2060, 303, 304, 305, 2452, 2147, 4574, 4538, 306, 2293, 1589, 893, 4946, 4370, 4841, 2342, 307, 308, 309, 894, 2246, 2155, 3646, 4059, 1431, 1331, 310, 311, 4836, 4948, 312, 895, 1779, 313, 314, 315, 316, 896, 1558, 1552, 317, 2312, 318, 319, 897, 320, 898, 321, 322, 899, 1958, 2022, 2016, 900, 2454, 323, 2427, 2134, 324, 901, 325, 902, 326, 2373, 4803, 2459, 1491, 327, 328, 903, 2463, 2264, 329, 330, 904, 1635, 4820, 905, 2506, 331, 4706, 2092, 4484, 1756, 906, 907, 4661, 2179, 4584, 332, 4907, 4635, 4529, 4683, 4523, 4561, 333, 2337, 3536, 2701, 2799, 3332, 3294, 3159, 3069, 2637, 3025, 2782, 3247, 3350, 2692, 2586, 3004, 3049, 2694, 2650, 3554, 2983, 3403, 3214, 3163, 2541, 3090, 3097, 3462, 1430, 2941, 3486, 2842, 3558, 3104, 3037, 3419, 2780, 2931, 1276, 2928, 2609, 3068, 3128, 2548, 2538, 2618, 2789, 3228, 2657, 3189, 2128, 2863, 3307, 3300, 2546, 3048, 3543, 2946, 2975, 3346, 3067, 2728, 2955, 3408, 3027, 3094, 3203, 2988, 2751, 2953, 2566, 2578, 2823, 3063, 3335, 3000, 3181, 3011, 3138, 3389, 2805, 3074, 2894, 3149, 2560, 3417, 3265, 3378, 2901, 2837, 2822, 2745, 3473, 3530, 3040, 2597, 3509, 3522, 3161, 2926, 3209, 3105, 3400, 2630, 2905, 2671, 2818, 2806, 2702, 2709, 2400, 3549, 3538, 2534, 2773, 2623, 3491, 3243, 3136, 2693, 3164, 3343, 2918, 2555, 2794, 2679, 3510, 3110, 2672, 3442, 2929, 3184, 3488, 2135, 4763, 3414, 3093, 2996, 3141, 3544, 3102, 2856, 2957, 3466, 3461, 2788, 2660, 3344, 3204, 2720, 3379, 2826, 1789, 2396, 2785, 3249, 3527, 4460, 3352, 2051, 2569, 4457, 2011, 4857, 2163, 4783, 4319, 3906, 1533, 1755, 1888, 4248, 1557, 2153, 3804, 1363, 1934, 1602, 1404, 4188, 1330, 4349, 3337, 3533, 2629, 3038, 2539, 3567, 3291, 3348, 3115, 3359, 2993, 3079, 3506, 2527, 2963, 2938, 2516, 3113, 1345, 2639, 3143, 3044, 2747, 3154, 3280, 3039, 2743, 2902, 3056, 2554, 2522, 3103, 3210, 3434, 2656, 4251, 4166, 4196, 3206, 3328, 2588, 3553, 2714, 3078, 3222, 3137, 3357, 2717, 2944, 3012, 3220, 3202, 2811, 3083, 3269, 3566, 2699, 2515, 3023, 2533, 3288, 3075, 3005, 2685, 3058, 2976, 2622, 3333, 3463, 2939, 3521, 3268, 3117, 2626, 2616, 3240, 2570, 3565, 2919, 3157, 2849, 3444, 2631, 3420, 2659, 3325, 3186, 2920, 3258, 3440, 3457, 3310, 2761, 3134, 2621, 3531, 2711, 2774, 2867, 2585, 3155, 2620, 3156, 2844, 3126, 3160, 2909, 3542, 3225, 2887, 3474, 3218, 2744, 2896, 3135, 3424, 3498, 3529, 2661, 2667, 2549, 2819, 2768, 2935, 3182, 2772, 3230, 3043, 2922, 3581, 3524, 2869, 2610, 3298, 2775, 3108, 2603, 3614, 2612, 2860, 3187, 3238, 3786, 4385, 3016, 3436, 2876, 2987, 3532, 3438, 3561, 3259, 2663, 2890, 3433, 3071, 3018, 2580, 2755, 3015, 2540, 3398, 2664, 2583, 2830, 2644, 2641, 3513, 2725, 2723, 3338, 3556, 2866, 2514, 2932, 2753, 2862, 2899, 2605, 2989, 3096, 3124, 2985, 2716, 3145, 3017, 2591, 2640, 3033, 1853, 3216, 3316, 3412, 2971, 3256, 3153, 3575, 3339, 2915, 2531, 3552, 3475, 3060, 3375, 2756, 3382, 2847, 2859, 3251, 3702, 3423, 2537, 2801, 3076, 2696, 3092, 3459, 3144, 3441, 2802, 3479, 2907, 3512, 3518, 3021, 2871, 3032, 2647, 2945, 3045, 2763, 3313, 3034, 3315, 3541, 2746, 2669, 2524, 3003, 2732, 3166, 3046, 3306, 2873, 3364, 3253, 3215, 3061, 2804, 2722, 2964, 2990, 2836, 4098, 4449, 3173, 2762, 3737, 2628, 3507, 2564, 3031, 2872, 3360, 2658, 2930, 2904, 3244, 3217, 3311, 3445, 2840, 3372, 2958, 3098, 3356, 3456, 3388, 2624, 3207, 2576, 2742, 2665, 2815, 3052, 3421, 2593, 3242, 2535, 2966, 2898, 2858, 2943, 2668, 2798, 3196, 2528, 2713, 3001, 2691, 2948, 2767, 2544, 3302, 2734, 2893, 2592, 2861, 3502, 2969, 2582, 3229, 2676, 2545, 3255, 3330, 2547, 3257, 2882, 3151, 3088, 2883, 3318, 2645, 2733, 2587, 3500, 3008, 2715, 2845, 3183, 2654, 3233, 3267, 2741, 2827, 2704, 3091, 2832, 2736, 3177, 3271, 2835, 2908, 3176, 2947, 3292, 3191, 2517, 3026, 3082, 3392, 3381, 2584, 2712, 3213, 3451, 2634, 3150, 2810, 3303, 2573, 3460, 2615, 3394, 2828, 3329, 4377, 4499, 3555, 2974, 3782, 3629, 3578, 3885, 2817, 3248, 2954, 3334, 3571, 3345, 3551, 3384, 3422, 1357, 1844, 2530, 2973, 4418, 4081, 3951, 1764, 1671, 1852, 334, 1843, 3449, 3185, 3399, 2786, 3055, 3472, 3397, 2601, 3564, 3277, 4373, 3548, 3179, 3407, 3841, 3347, 3142, 4255, 4431, 3241, 3077, 2700, 3147, 2648, 3283, 2829, 3278, 2581, 2536, 4363, 2848, 3410, 2797, 2523, 2520, 2721, 3496, 2571, 3198, 3219, 3030, 2673, 2921, 3837, 3301, 3322, 2705, 3239, 2949, 3369, 3396, 2892, 2897, 2766, 3174, 3297, 2550, 2889, 2933, 2793, 2627, 2677, 3119, 2596, 3226, 3172, 3089, 2868, 2839, 3942, 3120, 3286, 2843, 3465, 1564, 3946, 4222, 1504, 3999, 2682, 1875, 2865, 3539, 3168, 2864, 3308, 3557, 2940, 3109, 3503, 2625, 3455, 3114, 2595, 3331, 2978, 2518, 2521, 4079, 3024, 3573, 2952, 2653, 1769, 3180, 2813, 2652, 2600, 2816, 3201, 3188, 3270, 2997, 2992, 3009, 3520, 2936, 3275, 3165, 3447, 3131, 3305, 2809, 2792, 2729, 2814, 2619, 3266, 2825, 3066, 2857, 2998, 3064, 2681, 3035, 3279, 2764, 3480, 3127, 2912, 3010, 2607, 3211, 3111, 3041, 1573, 3909, 4269, 3487, 3489, 3019, 335, 1266, 1415, 2980, 3428, 2444, 3435, 3482, 3020, 2748, 2646, 2787, 2760, 2563, 3085, 3133, 3158, 3170, 2703, 3494, 2556, 2552, 3395, 3245, 3404, 2675, 2791, 2252, 4845, 1911, 4856, 908, 1935, 4711, 4728, 2460, 4517, 2749, 3341, 3355, 2575, 2942, 2886, 2758, 2594, 3495, 2884, 3516, 3042, 2737, 2923, 3563, 2855, 3476, 2611, 2937, 3383, 3497, 3402, 3162, 2662, 2875, 3223, 2878, 2079, 1808, 3285, 2757, 3057, 2951, 3519, 2579, 2853, 3387, 3401, 3493, 3393, 1608, 3365, 2885, 3574, 3081, 3007, 3568, 3152, 3367, 3358, 336, 2268, 3468, 3290, 3550, 3132, 2726, 2879, 3190, 3309, 2613, 2765, 3106, 1355, 3454, 2851, 2881, 3232, 3458, 3326, 3353, 2927, 3212, 2950, 3376, 3208, 3062, 3612, 3195, 3385, 2686, 2602, 3569, 3123, 2727, 1622, 2821, 2636, 2750, 2850, 3050, 2925, 3336, 3540, 2689, 3139, 2526, 3361, 3022, 3427, 3107, 3140, 3371, 3276, 2831, 3501, 2924, 3366, 3199, 3101, 3321, 3499, 2917, 2683, 2800, 2812, 3340, 3227, 3148, 3657, 4446, 1746, 1464, 1886, 2666, 3246, 3130, 3560, 3236, 2730, 3572, 1607, 3689, 2968, 1457, 1500, 909, 337, 1184, 3450, 2577, 2567, 2532, 3415, 2934, 2984, 2568, 4147, 4943, 3002, 2986, 910, 2979, 2542, 2331, 2492, 1762, 4472, 1472, 1529, 2319, 2131, 4057, 2048, 4887, 1976, 4507, 1583, 338, 2078, 2372, 2102, 339, 911, 1711, 340, 912, 2013, 913, 2277, 914, 341, 915, 4672, 4902, 916, 342, 1594, 4440, 917, 343, 344, 4559, 918, 2233, 2439, 919, 345, 920, 346, 921, 922, 347, 2226, 348, 2180, 2298, 349, 350, 2099, 2036, 351, 4808, 923, 924, 4498, 1518, 3728, 3637, 3570, 3429, 4091, 2870, 2995, 4338, 3205, 2880, 3261, 1994, 3968, 4291, 4204, 4071, 4034, 1742, 2820, 3912, 3287, 1218, 1190, 4145, 353, 2422, 354, 355, 925, 1782, 2184, 2261, 2490, 926, 927, 928, 4630, 2137, 3610, 356, 357, 4729, 358, 359, 4224, 1918, 1959, 1840, 3736, 2471, 1770, 929, 930, 931, 4155, 360, 361, 362, 932, 363, 364, 1279, 2289, 365, 1543, 366, 2156, 2472, 367, 4049, 1633, 1722, 368, 369, 1495, 1566, 370, 4967, 372, 373, 1211, 1873, 2101, 2494, 1726, 374, 1442, 933, 1748, 4142, 1434, 1358, 1191, 3732, 4110, 4039, 4411, 4506, 4270, 4156, 3780, 4036, 4030, 4016, 1550, 3899, 1247, 1855, 1181, 3919, 1639, 3664, 1244, 4140, 3930, 4117, 4189, 4001, 3799, 3643, 3619, 1240, 1686, 1479, 1307, 1575, 4296, 1665, 3871, 4135, 1605, 4408, 3604, 1274, 4149, 1313, 3741, 1938, 3709, 1727, 3893, 1280, 3622, 1784, 3834, 1752, 1983, 1743, 3979, 4461, 4113, 3817, 4232, 1340, 1489, 4214, 3902, 1857, 2316, 1904, 1219, 1486, 1512, 1481, 1516, 3820, 3789, 4252, 4047, 4330, 4082, 4094, 1574, 1248, 4078, 1872, 1426, 3785, 3687, 4318, 4243, 3866, 3704, 4172, 1621, 4315, 1192, 1513, 1856, 3324, 2769, 2678, 1561, 3296, 375, 2343, 2348, 376, 377, 1395, 1584, 4093, 4453, 3940, 3778, 4374, 4210, 4009, 4264, 4339, 4368, 1738, 378, 1610, 4194, 4474, 4013, 4266, 1771, 1759, 1922, 3860, 3832, 1349, 1381, 3663, 1642, 1185, 4356, 3932, 1233, 4212, 3858, 1198, 4192, 3611, 1919, 1819, 3790, 3712, 1969, 4095, 1887, 4468, 1720, 4247, 934, 1790, 2002, 1657, 1663, 1336, 3894, 1554, 1494, 1405, 3576, 4314, 3695, 1851, 1850, 4362, 1815, 3845, 4511, 3656, 3638, 1406, 1596, 4454, 1443, 1661, 935, 4504, 1359, 1734, 3650, 1910, 1305, 1648, 3831, 4435, 1208, 1988, 4451, 1993, 1986, 3849, 1718, 4068, 1835, 1425, 1428, 1282, 4380, 1658, 1452, 1687, 4024, 379, 4072, 3791, 4491, 4323, 4014, 1304, 1440, 1511, 1981, 1676, 1547, 4422, 1283, 3861, 1383, 3644, 3691, 4259, 1749, 1418, 1176, 4216, 1924, 1421, 1387, 3992, 4423, 4253, 1618, 1871, 1256, 3748, 4119, 1297, 1586, 1251, 1299, 1954, 4450, 3990, 4029, 4097, 3890, 3796, 1389, 3711, 4344, 1578, 1476, 4343, 1202, 4413, 4384, 3808, 1647, 1475, 3892, 3674, 1739, 3926, 3595, 1943, 3756, 4405, 3973, 4109, 4159, 3744, 4387, 1960, 4275, 3781, 1535, 1210, 4492, 4365, 4118, 3655, 3886, 4278, 4383, 4485, 1392, 3751, 3931, 3986, 3678, 1249, 4353, 4208, 3710, 4238, 4213, 3969, 4436, 3175, 4128, 2970, 1228, 3534, 3437, 3406, 3641, 3639, 3954, 4335, 3995, 3582, 4475, 3784, 4470, 4010, 3802, 3941, 4427, 4396, 4348, 3587, 3818, 3864, 3956, 3863, 3731, 3814, 4067, 4354, 4350, 4334, 3821, 1932, 3929, 4171, 1258, 3824, 3631, 4465, 4494, 1320, 1398, 3828, 1204, 1223, 1284, 1685, 3773, 4209, 3014, 4462, 4246, 4190, 4312, 4023, 3760, 3753, 1178, 3884, 2783, 4038, 3545, 2916, 3112, 2834, 3880, 3673, 4102, 4399, 4048, 3752, 4207, 1235, 3943, 4355, 4087, 4100, 4327, 4037, 4163, 3918, 4486, 1243, 3933, 4178, 1662, 1643, 4152, 3634, 3617, 4445, 4303, 1370, 3838, 4199, 4284, 1213, 4382, 1399, 1187, 3714, 1828, 4487, 3615, 1842, 1501, 3746, 4018, 4420, 3606, 4121, 3724, 3935, 4419, 4282, 1955, 1949, 4310, 4488, 1577, 4127, 1288, 1171, 3670, 4052, 3627, 3777, 936, 1371, 3685, 1325, 1940, 380, 4482, 4258, 3812, 1581, 1860, 4124, 4508, 4500, 3652, 3972, 1309, 1630, 1528, 3717, 1217, 3692, 4430, 3764, 4316, 4285, 3645, 3971, 4421, 1172, 4026, 2740, 3125, 3546, 1725, 1206, 3842, 4404, 3690, 3962, 4513, 4340, 4329, 4410, 3703, 4136, 1763, 1487, 3589, 3907, 4153, 2707, 3730, 4426, 4180, 4041, 3923, 4444, 3851, 4429, 4361, 1441, 4394, 4302, 3758, 4510, 3742, 1868, 4077, 1710, 1939, 1335, 1666, 1407, 4187, 1193, 1188, 1196, 1724, 1717, 1200, 1646, 1997, 1975, 1701, 4280, 1613, 4006, 1984, 1351, 3653, 3833, 1593, 2561, 4442, 3900, 4298, 1761, 4388, 1820, 1597, 4317, 4249, 1341, 1203, 1680, 4441, 3628, 3725, 1945, 937, 4206, 1588, 1439, 3794, 4447, 1838, 3776, 3658, 4064, 1377, 4011, 4272, 4503, 1324, 1367, 3594, 3680, 1300, 1750, 938, 3913, 3774, 1877, 1987, 1862, 3998, 1380, 4185, 3686, 3696, 4463, 1350, 4008, 4230, 3853, 4244, 4083, 381, 1909, 3897, 1546, 382, 3613, 3273, 3452, 3525, 1229, 4105, 3835, 383, 1263, 1234, 3970, 1492, 3856, 3586, 1175, 4321, 4020, 4144, 1224, 1199, 3667, 2778, 4412, 4407, 1812, 1810, 3823, 1416, 1427, 1507, 1878, 4333, 3146, 4281, 4211, 1179, 3843, 1669, 1677, 1524, 1525, 1974, 384, 1979, 1456, 1239, 4167, 3740, 1876, 1388, 1967, 1474, 385, 1342, 1471, 4176, 1232, 1989, 4125, 1741, 1508, 1580, 4060, 4378, 1576, 1212, 1893, 3921, 3585, 1174, 1396, 4061, 4015, 1207, 3698, 3825, 3922, 4021, 4181, 1598, 1916, 1429, 4502, 4231, 1321, 4390, 3693, 3734, 1382, 3684, 1747, 3806, 3896, 3635, 1768, 4025, 3976, 3840, 3963, 4286, 1502, 3836, 4161, 3659, 3743, 4130, 3605, 1385, 1783, 4392, 4328, 1316, 4173, 4265, 1246, 1985, 1629, 1829, 1737, 3826, 1473, 1992, 1883, 1656, 1837, 1914, 1839, 1834, 3984, 4495, 3910, 4160, 3671, 4184, 4132, 4250, 1503, 1237, 1523, 1417, 4063, 1562, 3977, 1971, 1707, 1847, 1792, 3769, 4074, 1534, 4239, 4003, 3915, 1689, 1776, 1599, 1265, 1410, 1823, 1498, 1329, 939, 386, 940, 1655, 3874, 4261, 3626, 1791, 3579, 1644, 3936, 4054, 4260, 4359, 4131, 4297, 4357, 4022, 3770, 4046, 1222, 1996, 3788, 4169, 1925, 3953, 4228, 4226, 4277, 4101, 1889, 1369, 3797, 4088, 4019, 3771, 3632, 1402, 388, 1520, 1767, 1466, 1194, 4137, 1908, 1927, 1758, 3772, 3661, 4186, 4174, 1170, 3850, 1315, 1611, 1530, 1859, 2209, 4183, 1408, 1403, 941, 4033, 3623, 3596, 1461, 1848, 1173, 1928, 1459, 1765, 1826, 3719, 1931, 3584, 4004, 3591, 3967, 4168, 3957, 3878, 4165, 4191, 3980, 4058, 4200, 4336, 3958, 1260, 4051, 3798, 4032, 1774, 4322, 3991, 4106, 1641, 1570, 3978, 3965, 4464, 3813, 4154, 1365, 4257, 3846, 4345, 4379, 3603, 1693, 3937, 3801, 1787, 1214, 4483, 4201, 1898, 1845, 1226, 1220, 4245, 1347, 3867, 1900, 3640, 3916, 4089, 1209, 3745, 3988, 3975, 4236, 4075, 4146, 4256, 4308, 4000, 4148, 3588, 3868, 4403, 3883, 4326, 4393, 3895, 4237, 3955, 3727, 4005, 4092, 4372, 4283, 1553, 3805, 4151, 1281, 1681, 4489, 3982, 4437, 3597, 4342, 3872, 3987, 4490, 3876, 3668, 4300, 1679, 1242, 3598, 3583, 3647, 389, 4304, 3793, 3779, 1937, 1907, 4042, 3648, 3996, 3800, 4367, 4099, 1807, 3887, 4428, 1625, 1390, 1884, 1682, 4364, 4306, 3869, 1278, 1672, 942, 1505, 1542, 1709, 1915, 3600, 3914, 1968, 3948, 1670, 3811, 1865, 1362, 943, 1716, 3961, 1506, 4221, 1376, 944, 1683, 4276, 1445, 1721, 1632, 3607, 1328, 1455, 1913, 1497, 1317, 1951, 1778, 1379, 3768, 4225, 1668, 2383, 945, 390, 391, 4406, 4341, 1480, 392, 393, 394, 395, 1714, 1422, 396, 2043, 946, 2265, 397, 3618, 4433, 1177, 3898, 398, 2251, 947, 948, 2212, 949, 950, 399, 951, 400, 1965, 4640, 2129, 2345, 4471, 952, 953, 401, 402, 2475, 403, 404, 4758, 955, 2437, 4139, 1482, 3602, 4434, 3721, 1592, 1825, 1698, 1519, 1352, 4202, 4409, 1977, 1917, 405, 406, 407, 408, 956, 2272, 957, 2267, 1631, 1684, 409, 2054, 3889, 958, 410, 2117, 411, 959, 412, 960, 2443, 4712, 4619, 2285, 413, 414, 415, 961, 2352, 2417, 962, 1905, 416, 963, 417, 418, 2382, 3675, 1833, 3974, 419, 964, 421, 965, 966, 967, 4919, 968, 2365, 969, 970, 422, 1897, 2056, 2309, 4733, 1272, 4754, 2207, 971, 423, 4133, 3830, 4865, 972, 424, 973, 425, 2068, 4955, 426, 974, 2109, 2380, 427, 1708, 4676, 428, 4141, 429, 430, 3749, 431, 1619, 975, 4044, 3590, 1944, 4126, 1923, 1706, 432, 976, 977, 978, 4867, 4400, 433, 434, 1606, 2143, 979, 435, 980, 2604, 2895, 981, 436, 3448, 4959, 2188, 437, 438, 2055, 1692, 982, 2388, 2433, 2243, 983, 2035, 2120, 4940, 439, 440, 2474, 442, 4900, 2052, 4764, 3862, 4055, 4358, 984, 2435, 4589, 2276, 2401, 985, 1664, 443, 2073, 2405, 986, 4309, 4045, 3854, 3682, 2491, 444, 445, 1972, 2688, 4366, 3425, 3231, 3649, 2759, 2724, 3873, 3755, 1216, 3599, 3775, 2754, 2606, 3471, 3234, 2565, 2803, 2562, 2684, 3411, 3405, 2690, 1255, 3694, 446, 3985, 3535, 1306, 4084, 3282, 447, 1353, 2168, 1780, 987, 988, 989, 2126, 448, 449, 2107, 450, 2031, 990, 451, 452, 991, 1485, 453, 992, 1728, 993, 4703, 994, 995, 454, 1696, 996, 2039, 455, 997, 4874, 998, 3116, 1869, 456, 4759, 2500, 4798, 2262, 4562, 457, 1386, 999, 458, 4768, 4982, 4778, 2040, 1000, 4981, 3879, 2698, 459, 460, 1001, 461, 1447, 462, 1002, 2042, 2339, 1003, 463, 464, 4425, 1645, 465, 1004, 466, 2328, 467, 468, 469, 1231, 1468, 470, 471, 2496, 472, 473, 1005, 474, 475, 2108, 4725, 476, 1273, 1007, 1744, 1488, 1659, 477, 478, 4598, 1604, 4753, 2493, 479, 1008, 1009, 480, 1011, 1012, 1013, 1014, 481, 4313, 482, 483, 1499, 484, 1015, 4761, 2091, 2386, 2513, 1016, 4073, 1777, 2172, 485, 2205, 4592, 4545, 486, 1458, 4274, 2122, 4905, 5003, 4599, 4796, 2152, 4539, 4528, 4904, 4842, 4986, 4846, 4650, 4595, 2195, 4681, 2142, 487, 4710, 1775, 4205, 1526, 4586, 4602, 4518, 1697, 1017, 2000, 4692, 4795, 2480, 2017, 488, 2335, 489, 4969, 1894, 1882, 1817, 1880, 490, 1018, 3917, 3616, 4311, 1800, 4473, 4085, 4401, 1310, 3783, 3765, 1538, 3870, 491, 1948, 3699, 1735, 3792, 4290, 2074, 492, 2202, 5001, 2136, 493, 2211, 4532, 494, 2421, 495, 4090, 2378, 2104, 2210, 2247, 2478, 2047, 496, 4620, 4978, 4614, 1019, 2012, 1803, 3642, 497, 1322, 4752, 1020, 498, 1021, 2235, 2302, 2488, 4665, 4540, 5006, 4699, 4608, 4781, 499, 2049, 4685, 500, 501, 1022, 502, 1333, 503, 1023, 4686, 4804, 504, 4727, 505, 506, 4938, 4805, 2065, 1890, 4891, 1024, 507, 508, 509, 2110, 1025, 510, 1026, 3608, 1732, 511, 2397, 1864, 1816, 1531, 512, 513, 2451, 3636, 5012, 4892, 514, 1699, 4593, 1027, 4987, 515, 2495, 4660, 1028, 516, 1029, 2409, 1366, 2112, 2178, 2124, 2376, 5011, 4572, 4957, 4789, 4543, 4664, 4678, 2093, 4746, 2489, 4922, 2145, 1030, 4832, 4950, 1261, 4027, 3478, 3763, 2959, 1293, 2462, 517, 3197, 1595, 3413, 2238, 2067, 1031, 2228, 518, 4698, 4616, 2057, 2305, 2133, 2061, 4526, 4617, 1032, 1033, 2429, 2311, 1675, 4785, 1797, 519, 4578, 2271, 4693, 4604, 2466, 2148, 2420, 520, 4854, 2381, 2315, 2284, 4813, 521, 1034, 522, 523, 1999, 3759, 1215, 4122, 1730, 524, 525, 526, 3966, 4573, 5008, 1035, 527, 4973, 2508, 528, 3911, 529, 3289, 1821, 530, 531, 2426, 1036, 532, 1874, 533, 534, 1037, 535, 1038, 536, 1039, 537, 538, 539, 1040, 3767, 1929, 1042, 3683, 2100, 4853, 2300, 2165, 540, 2105, 541, 1043, 4906, 542, 1338, 2292, 2021, 1616, 1901, 1796, 1517, 4331, 4332, 4466, 2719, 3803, 4123, 4233, 1824, 3129, 3087, 3505, 4158, 4254, 1449, 1044, 3720, 4351, 4414, 1673, 3453, 3254, 2501, 1649, 543, 544, 545, 546, 1045, 547, 4240, 3580, 4680, 1046, 548, 2062, 549, 1047, 550, 2598, 551, 552, 553, 3819, 1259, 4062, 1048, 554, 2841, 1049, 1050, 3515, 2219, 1433, 1323, 4301, 555, 556, 1051, 557, 558, 1052, 1053, 3738, 1567, 559, 1054, 1270, 3857, 1055, 2151, 560, 2175, 2089, 1056, 4514, 2198, 2193, 1257, 1238, 3662, 561, 2186, 1057, 4637, 562, 1058, 563, 4872, 2097, 2436, 564, 1059, 565, 566, 1060, 1061, 2231, 4203, 1899, 3981, 1062, 1303, 4116, 567, 1063, 568, 569, 570, 2367, 1946, 3620, 1064, 1514, 4002, 3679, 3964, 3707, 3666, 1348, 4273, 1804, 4497, 571, 1401, 4438, 1895, 1264, 572, 1912, 573, 3939, 4170, 4056, 1271, 1065, 1521, 1221, 1066, 1451, 1654, 1067, 3934, 4080, 4352, 574, 1700, 3739, 1565, 1419, 1811, 3950, 1690, 1397, 3716, 1569, 1465, 1437, 1674, 4337, 1285, 4268, 1183, 3726, 3881, 4134, 4347, 4012, 3938, 4066, 4198, 4416, 4164, 3630, 4229, 4292, 4193, 4325, 4375, 4371, 4432, 4215, 1753, 3944, 1409, 4195, 1729, 4223, 1540, 4455, 1068, 1069, 4512, 1723, 1070, 3750, 3633, 4070, 4104, 4162, 4235, 1863, 4346, 1881, 1071, 1814, 1572, 2418, 575, 4443, 3761, 1346, 1587, 1072, 3592, 576, 1891, 4469, 2430, 1275, 577, 1950, 1963, 4129, 1073, 1296, 1360, 1551, 3733, 4111, 3993, 4108, 3949, 1287, 1713, 1556, 1736, 1995, 1435, 1424, 1830, 1705, 1861, 1197, 1254, 4120, 1545, 4417, 1469, 1292, 2185, 2279, 1785, 1236, 4293, 1827, 3839, 3983, 4395, 1957, 2222, 578, 3928, 4295, 3715, 3855, 3609, 1990, 4076, 4175, 3927, 1757, 1650, 4299, 1773, 2004, 1267, 1364, 579, 1462, 1879, 4007, 3729, 3665, 3722, 1691, 1712, 1074, 1624, 1751, 1394, 3924, 3952, 580, 581, 2003, 1343, 2203, 1559, 1250, 1555, 582, 2395, 4114, 1818, 1075, 583, 1076, 1077, 1704, 4448, 584, 4882, 1078, 1079, 1786, 585, 3354, 1832, 586, 3432, 2891, 587, 588, 4583, 2505, 1903, 2077, 4936, 4658, 4830, 2446, 1080, 2278, 1081, 1082, 4459, 1083, 589, 1563, 1084, 2255, 2113, 590, 591, 1085, 592, 2308, 593, 594, 2274, 595, 4931, 2407, 1858, 596, 597, 598, 1453, 2559, 2590, 2738, 4478, 4069, 1809, 1327, 4150, 3260, 3481, 3672, 3625, 2008, 4439, 3852, 3997, 1411, 599, 3847, 4993, 1268, 4050, 3377, 4424, 1496, 4143, 4493, 3492, 1962, 1412, 2455, 600, 2457, 1086, 601, 4017, 4477, 1794, 2483, 2291, 602, 4263, 3072, 2009, 2199, 1754, 1087, 1088, 3888, 603, 604, 4777, 2324, 605, 1368, 3827, 4103, 606, 607, 1089, 2220, 4549, 1090, 1571, 1091, 1438, 608, 1092, 609, 2320, 2069, 610, 611, 1093, 612, 1094, 3701, 4389, 613, 4897, 1603, 614, 1095, 5000, 615, 616, 2263, 1332, 1715, 4369, 1652, 1096, 617, 1541, 618, 1921, 1733, 1373, 1870, 619, 4218, 1798, 2387, 1097, 1098, 1099, 1100, 620, 1702, 621, 622, 4801, 4855, 4847, 2398, 2239, 1101, 1667, 1384, 623, 4745, 3700, 1788, 1600, 624, 2098, 625, 4550, 4721, 4960, 4878, 2473, 4792, 4675, 1102, 1423, 626, 2771, 627, 1339, 3875, 628, 629, 3070, 4565, 2118, 2015, 4818, 2557, 2795, 2906, 2103, 4869, 2029, 3299, 3118, 4932, 4838, 4901, 4908, 4996, 4779, 4657, 4646, 4875, 4627, 4515, 4876, 4965, 4605, 4576, 2028, 4985, 4850, 1103, 4757, 4747, 1614, 1947, 2237, 630, 631, 4997, 4618, 4479, 3766, 632, 1104, 1105, 4886, 1106, 2432, 633, 1107, 4530, 634, 2371, 4651, 1108, 4536, 635, 1813, 636, 2431, 4866, 4991, 4814, 4560, 4956, 637, 4555, 1109, 4941, 4577, 4633, 2213, 638, 639, 3706, 1110, 640, 1111, 641, 4581, 4893, 4831, 2481, 4644, 4734, 2190, 4524, 4881, 4837, 4888, 4648, 642, 4807, 4896, 4868, 2374, 1112, 4823, 2164, 1113, 3735, 3390, 1694, 3431, 2838, 3483, 3464, 3848, 2558, 3314, 3086, 3029, 2956, 3517, 2651, 2914, 2680, 2632, 3121, 3100, 3528, 3526, 3084, 4220, 3304, 2846, 1186, 3235, 2903, 3559, 2687, 3409, 3237, 2900, 2999, 3349, 3171, 2752, 3262, 3504, 3047, 4376, 3193, 3430, 2525, 2670, 2911, 3508, 2776, 2697, 3200, 2790, 3323, 2543, 2874, 2614, 3904, 3373, 3054, 2617, 4242, 3621, 2708, 4179, 4398, 3959, 4935, 1269, 3095, 1286, 3624, 4481, 1432, 3511, 2735, 4381, 3295, 1585, 2390, 1568, 1114, 1766, 3221, 2643, 2739, 643, 4735, 4760, 4629, 1115, 4918, 4688, 3920, 644, 4723, 4949, 4748, 4607, 4719, 1116, 645, 646, 4611, 2353, 4645, 4603, 4762, 4819, 2221, 4636, 4992, 4998, 2307, 647, 1801, 4279, 3762, 1637, 1509, 4843, 4797, 4590, 4995, 4541, 2200, 4580, 4858, 648, 649, 2502, 1117, 4780, 4800, 2477, 4724, 4551, 4674, 1118, 1119, 2965, 2369, 2695, 3293, 650, 651, 4730, 4862, 4722, 4944, 1120, 652, 1121, 4983, 4784, 4877, 4643, 653, 654, 4909, 1122, 3264, 655, 2076, 4849, 656, 657, 2447, 658, 659, 4035, 2910, 3391, 2808, 3099, 2913, 3676, 2852, 3284, 2731, 1609, 2375, 2201, 3537, 3994, 1319, 4467, 1802, 1227, 1623, 660, 4844, 2086, 4770, 4714, 4979, 4812, 2192, 1123, 661, 2364, 662, 663, 664, 1124, 1125, 665, 2487, 4899, 2138, 1126, 666, 667, 4569, 4554, 4917, 2322, 1127, 1128, 1129, 668, 669, 1130, 670, 1131, 1527, 1132, 671, 1772, 2314, 1133, 1134, 2470, 1135, 672, 2236, 4716, 673, 4600, 2196, 2456, 4606, 4588, 4963, 4851, 4558, 4557, 4697, 4610, 4773, 4687, 4708, 4910, 2123, 1136, 1137, 2358, 5005, 2208, 4952, 4945, 1933, 1731, 1793, 675, 676, 3342, 1138, 677, 4597, 4870, 1140, 4990, 4954, 4916, 678, 1141, 4737, 4527, 2253, 4531, 679, 1142, 1143, 680, 4771, 1144, 4638, 681, 4705, 4525, 4522, 4898, 2325, 2415, 5004, 1145, 682, 683, 2141, 1146, 684, 685, 2445, 686, 687, 4861, 2157, 688, 3822, 689, 690, 4743, 691, 1147, 1601, 692, 1148, 693, 4537, 4825, 4625, 4621, 3905, 694, 695, 1414, 1149, 696, 2027, 2159, 4756, 4690, 4859, 4793, 4575, 2160, 4828, 4731, 4718, 4802, 4750, 1150, 2081, 2258, 697, 1795, 1372, 1695, 1866, 1151, 4115, 1719, 2280, 4662, 698, 2176, 2194, 2217, 1920, 699, 700, 701, 4999, 1544, 4739, 702, 703, 4031, 4305, 1636, 1393, 2010, 3810, 4452, 3677, 4227, 1277, 1400, 4402, 4157, 4197, 1337, 1253, 1532, 4028, 3989, 2449, 4715, 704, 2050, 1493, 1854, 1902, 1510, 1152, 4824, 705, 2340, 4182, 706, 2442, 2484, 707, 708, 709, 4667, 1153, 2412, 4732, 4476, 2053, 710, 1375, 711, 712, 713, 4829, 4738, 4811, 4570, 4961, 1245, 714, 2045, 4707, 715, 2169, 4713, 1841, 4234, 4924, 1154, 1314, 4096, 2023, 716, 717, 4895, 718, 1155, 719, 720, 2063, 1311, 721, 4642, 722, 4833, 4903, 4885, 4666, 2249, 4217, 1156, 723, 1157, 1627, 2116, 4566, 2287, 1158, 2330, 4826, 4622, 4740, 724, 4700, 725, 1159, 5013, 4894, 726, 2434, 1953, 1160, 1201, 727, 3787, 2046, 1161, 728, 729, 2485, 2044, 4568, 3747, 2248, 730, 731, 2024, 1846, 2507, 2368, 1162, 2019, 2333, 3815, 2005, 2266, 1964, 2347, 2385, 732, 2177, 2059, 4958, 4927, 1822, 4815, 1262, 2094, 4480, 1537, 1291, 2419, 1318, 2283, 4976, 4628, 4294, 2486, 4926, 1582, 2162, 733, 4587, 734, 735, 3439, 2833, 4287, 4509, 4505, 4267, 3697, 3272, 4112, 2967, 3651, 1991, 1805, 1628, 3705, 2479, 736, 1195, 4863, 1163, 3859, 1164, 2394, 1165, 2355, 2351, 4679, 4835, 2259, 4839, 4571, 1166, 4968, 2250, 4912, 2423, 737, 1167, 4989, 4684, 4669, 4552, 4612, 2127, 1745, 1973, 4767, 1168, 2273, 2310, 3807, 4307, 1169, 2303, 1454, or 1781.

36. The VP capsid polypeptide of claim 33, wherein the 581 to 589 region of the VP capsid polypeptide has a sequence of any one of SEQ ID NOs: 2498, 4884, 738, 739, 4177, 1289, 740, 14, 15, 741, 742, 743, 16, 744, 17, 18, 745, 3477, 1548, 3051, 2982, 2171, 2877, 746, 19, 20, 3036, 3426, 3073, 3169, 747, 2406, 3362, 2784, 4889, 21, 3192, 4942, 22, 23, 1638, 748, 24, 25, 749, 26, 27, 1703, 1836, 28, 2038, 2301, 3660, 29, 750, 30, 31, 32, 2095, 1640, 33, 35, 36, 37, 4742, 2450, 38, 4925, 39, 751, 752, 1653, 1205, 3795, 753, 4288, 4219, 2770, 2962, 4241, 4107, 2718, 3317, 4391, 4053, 3263, 2553, 3947, 2710, 2608, 3467, 2796, 2961, 2529, 3320, 2674, 2635, 3446, 3053, 3250, 3688, 1182, 1998, 4320, 3351, 2655, 3514, 2779, 3194, 3319, 3224, 3281, 3708, 2807, 3562, 3274, 3374, 3013, 3416, 2981, 3065, 2777, 3469, 2977, 2638, 2972, 3059, 2574, 3380, 4262, 3167, 3368, 2781, 3547, 3386, 1225, 2960, 3485, 3370, 3443, 2824, 754, 1467, 3327, 3178, 3006, 3252, 2991, 3470, 2888, 2572, 3418, 2642, 2519, 3363, 40, 2633, 41, 42, 43, 755, 2511, 44, 45, 756, 46, 757, 47, 48, 1952, 758, 2341, 2410, 49, 3122, 2551, 3718, 4806, 2216, 3484, 3577, 759, 2080, 50, 1308, 1230, 3960, 1378, 2994, 3080, 2589, 3681, 51, 4694, 2257, 52, 760, 53, 2389, 4934, 4951, 761, 762, 4659, 54, 2146, 3925, 55, 3654, 2087, 2346, 4766, 4682, 4984, 4744, 56, 763, 764, 4626, 4702, 58, 59, 60, 61, 4086, 1740, 1660, 765, 766, 62, 1966, 2032, 2499, 2332, 767, 63, 2096, 2181, 4913, 64, 768, 769, 770, 2384, 2402, 771, 65, 66, 2111, 67, 772, 2458, 2197, 68, 3816, 69, 2599, 2706, 2497, 70, 2234, 2183, 2399, 71, 4769, 2366, 72, 73, 74, 3865, 1549, 1361, 2453, 3882, 773, 3713, 1942, 75, 1312, 4501, 76, 77, 774, 1413, 775, 776, 78, 1560, 4289, 3757, 79, 3593, 4043, 1806, 3908, 4397, 1615, 4415, 3723, 2006, 3754, 1470, 4360, 80, 3945, 2854, 3523, 3669, 1356, 777, 2132, 2379, 82, 4065, 83, 84, 2030, 1294, 2413, 2064, 1484, 85, 4594, 86, 778, 87, 3891, 4456, 4040, 4496, 1982, 2001, 1478, 1189, 88, 1490, 1885, 1926, 89, 90, 91, 779, 2270, 780, 2161, 1180, 92, 781, 782, 783, 93, 2356, 784, 785, 786, 94, 95, 787, 788, 1831, 1867, 96, 4458, 97, 1970, 4656, 2173, 1936, 2349, 1590, 4585, 98, 99, 100, 789, 790, 1298, 101, 1688, 791, 792, 2007, 2070, 102, 793, 4632, 103, 794, 795, 104, 105, 106, 2229, 796, 4980, 4691, 107, 2440, 1849, 108, 2014, 797, 4736, 2509, 2018, 2227, 4787, 109, 1579, 110, 1906, 111, 2428, 798, 112, 2411, 113, 2359, 799, 4848, 800, 2461, 1444, 2313, 2350, 4579, 4821, 801, 114, 2329, 4834, 115, 1344, 116, 802, 117, 118, 119, 4929, 4677, 120, 2158, 121, 803, 804, 1463, 805, 122, 2139, 2290, 1760, 2465, 2424, 2058, 2230, 124, 4717, 806, 125, 126, 2370, 127, 4521, 128, 4971, 4994, 807, 2085, 129, 130, 131, 132, 4933, 808, 2336, 2026, 2204, 809, 810, 2281, 133, 1978, 134, 811, 812, 135, 136, 137, 138, 813, 814, 139, 4673, 140, 815, 1326, 141, 142, 143, 2344, 4544, 144, 145, 816, 4654, 4816, 1634, 1302, 817, 146, 818, 147, 148, 149, 4546, 150, 151, 152, 153, 154, 155, 819, 820, 156, 2149, 157, 2295, 821, 158, 159, 160, 161, 4631, 2441, 162, 163, 164, 165, 166, 822, 167, 168, 169, 170, 171, 823, 172, 4613, 824, 1651, 173, 1483, 174, 175, 825, 176, 177, 178, 179, 4624, 2170, 4809, 4520, 180, 826, 827, 181, 828, 4695, 4911, 182, 4582, 4873, 4596, 2020, 183, 4641, 829, 184, 185, 2244, 4647, 186, 187, 188, 189, 190, 2114, 830, 191, 192, 193, 194, 2071, 4615, 2361, 195, 4852, 2187, 4914, 4947, 196, 1391, 197, 4534, 4726, 4788, 198, 199, 4920, 831, 2240, 2223, 200, 201, 202, 203, 2106, 2503, 4775, 204, 205, 832, 833, 206, 834, 2232, 2294, 207, 2166, 208, 209, 210, 835, 836, 1334, 837, 3901, 3312, 2649, 1301, 211, 212, 1450, 4386, 3028, 213, 1446, 214, 2206, 215, 1896, 1522, 3490, 838, 216, 2241, 217, 218, 4653, 219, 1612, 220, 221, 222, 839, 223, 4953, 2360, 840, 224, 4928, 4741, 225, 2088, 4751, 5007, 4542, 226, 227, 4890, 4519, 4883, 228, 4786, 229, 230, 231, 2393, 2448, 841, 842, 232, 233, 4782, 234, 4962, 2269, 843, 235, 844, 236, 237, 4930, 845, 846, 238, 847, 4704, 239, 848, 849, 2150, 850, 851, 852, 853, 1536, 240, 854, 241, 242, 243, 244, 245, 246, 247, 248, 4923, 2245, 4696, 855, 4634, 856, 249, 250, 251, 252, 253, 254, 255, 857, 2115, 4880, 256, 257, 258, 259, 858, 859, 260, 261, 860, 861, 862, 262, 4966, 863, 864, 263, 4749, 4970, 2296, 2318, 865, 2326, 264, 1241, 265, 266, 866, 1477, 267, 867, 4977, 268, 868, 269, 4668, 5002, 270, 869, 870, 271, 871, 872, 272, 4822, 4709, 873, 4655, 4972, 2392, 874, 1252, 273, 1591, 4975, 875, 274, 2025, 275, 1980, 276, 876, 877, 2066, 277, 278, 279, 4670, 280, 2323, 2288, 2334, 4689, 281, 878, 1892, 879, 1539, 2214, 2215, 880, 2327, 881, 882, 4601, 883, 1295, 3601, 3877, 1930, 1420, 1678, 1460, 2306, 884, 282, 1799, 283, 284, 4988, 4553, 4772, 4817, 2260, 285, 1626, 2082, 885, 286, 1374, 886, 2119, 2468, 287, 1620, 1290, 2425, 2482, 4671, 2282, 288, 2354, 1354, 2033, 289, 887, 290, 888, 291, 1956, 2467, 889, 2357, 4547, 4765, 292, 4794, 2391, 4324, 890, 294, 295, 4138, 891, 2297, 296, 2224, 3903, 297, 892, 3829, 298, 299, 3809, 4271, 3844, 1436, 300, 1515, 1617, 4701, 2174, 301, 1961, 4649, 5010, 302, 303, 304, 305, 2452, 2147, 306, 2293, 1589, 893, 4370, 4841, 2342, 307, 308, 309, 894, 2246, 2155, 3646, 4059, 1431, 1331, 310, 311, 4836, 4948, 312, 895, 1779, 313, 314, 315, 316, 896, 1558, 1552, 317, 2312, 318, 319, 897, 320, 898, 321, 322, 899, 1958, 2022, 2016, 900, 2454, 323, 2427, 2134, 324, 901, 325, 902, 326, 2373, 4803, 2459, 1491, 327, 328, 903, 2463, 2264, 329, 330, 904, 1635, 4820, 905, 2506, 331, 4706, 2092, 4484, 1756, 906, 907, 4661, 2179, 4584, 332, 4907, 4635, 4529, 4683, 4523, 4561, 333, 2337, 3536, 2701, 2799, 3332, 3294, 3159, 3069, 2637, 3025, 2782, 3247, 3350, 2692, 2586, 3004, 3049, 2694, 2650, 3554, 2983, 3403, 3214, 3163, 2541, 3090, 3097, 3462, 1430, 2941, 3486, 2842, 3558, 3104, 3037, 3419, 2780, 2931, 1276, 2928, 2609, 3068, 3128, 2548, 2538, 2618, 2789, 3228, 2657, 3189, 2128, 2863, 3307, 3300, 2546, 3048, 3543, 2946, 2975, 3346, 3067, 2728, 2955, 3408, 3027, 3094, 3203, 2988, 2751, 2953, 2566, 2578, 2823, 3063, 3335, 3000, 3181, 3011, 3138, 3389, 2805, 3074, 2894, 3149, 2560, 3417, 3265, 3378, 2901, 2837, 2822, 2745, 3473, 3530, 3040, 2597, 3509, 3522, 3161, 2926, 3209, 3105, 3400, 2630, 2905, 2671, 2818, 2806, 2702, 2709, 2400, 3549, 3538, 2534, 2773, 2623, 3491, 3243, 3136, 2693, 3164, 3343, 2918, 2555, 2794, 2679, 3510, 3110, 2672, 3442, 2929, 3184, 3488, 2135, 4763, 3414, 3093, 2996, 3141, 3544, 3102, 2856, 2957, 3466, 3461, 2788, 2660, 3344, 3204, 2720, 3379, 2826, 1789, 2396, 2785, 3249, 3527, 4460, 3352, 2051, 2569, 4457, 2011, 4857, 2163, 4783, 4319, 3906, 1533, 1755, 1888, 4248, 1557, 2153, 3804, 1363, 1934, 1602, 1404, 4188, 1330, 4349, 3337, 3533, 2629, 3038, 2539, 3567, 3291, 3348, 3115, 3359, 2993, 3079, 3506, 2527, 2963, 2938, 2516, 3113, 1345, 2639, 3143, 3044, 2747, 3154, 3280, 3039, 2743, 2902, 3056, 2554, 2522, 3103, 3210, 3434, 2656, 4251, 4166, 4196, 3206, 3328, 2588, 3553, 2714, 3078, 3222, 3137, 3357, 2717, 2944, 3012, 3220, 3202, 2811, 3083, 3269, 3566, 2699, 2515, 3023, 2533, 3288, 3075, 3005, 2685, 3058, 2976, 2622, 3333, 3463, 2939, 3521, 3268, 3117, 2626, 2616, 3240, 2570, 3565, 2919, 3157, 2849, 3444, 2631, 3420, 2659, 3325, 3186, 2920, 3258, 3440, 3457, 3310, 2761, 3134, 2621, 3531, 2711, 2774, 2867, 2585, 3155, 2620, 3156, 2844, 3126, 3160, 2909, 3542, 3225, 2887, 3474, 3218, 2744, 2896, 3135, 3424, 3498, 3529, 2661, 2667, 2549, 2819, 2768, 2935, 3182, 2772, 3230, 3043, 2922, 3581, 3524, 2869, 2610, 3298, 2775, 3108, 2603, 3614, 2612, 2860, 3187, 3238, 3786, 4385, 3016, 3436, 2876, 2987, 3532, 3438, 3561, 3259, 2663, 2890, 3433, 3071, 3018, 2580, 2755, 3015, 2540, 3398, 2664, 2583, 2830, 2644, 2641, 3513, 2725, 2723, 3338, 3556, 2866, 2514, 2932, 2753, 2862, 2899, 2605, 2989, 3096, 3124, 2985, 2716, 3145, 3017, 2591, 2640, 3033, 1853, 3216, 3316, 3412, 2971, 3256, 3153, 3575, 3339, 2915, 2531, 3552, 3475, 3060, 3375, 2756, 3382, 2847, 2859, 3251, 3702, 3423, 2537, 2801, 3076, 2696, 3092, 3459, 3144, 3441, 2802, 3479, 2907, 3512, 3518, 3021, 2871, 3032, 2647, 2945, 3045, 2763, 3313, 3034, 3315, 3541, 2746, 2669, 2524, 3003, 2732, 3166, 3046, 3306, 2873, 3364, 3253, 3215, 3061, 2804, 2722, 2964, 2990, 2836, 4098, 4449, 3173, 2762, 3737, 2628, 3507, 2564, 3031, 2872, 3360, 2658, 2930, 2904, 3244, 3217, 3311, 3445, 2840, 3372, 2958, 3098, 3356, 3456, 3388, 2624, 3207, 2576, 2742, 2665, 2815, 3052, 3421, 2593, 3242, 2535, 2966, 2898, 2858, 2943, 2668, 2798, 3196, 2528, 2713, 3001, 2691, 2948, 2767, 2544, 3302, 2734, 2893, 2592, 2861, 3502, 2969, 2582, 3229, 2676, 2545, 3255, 3330, 2547, 3257, 2882, 3151, 3088, 2883, 3318, 2645, 2733, 2587, 3500, 3008, 2715, 2845, 3183, 2654, 3233, 3267, 2741, 2827, 2704, 3091, 2832, 2736, 3177, 3271, 2835, 2908, 3176, 2947, 3292, 3191, 2517, 3026, 3082, 3392, 3381, 2584, 2712, 3213, 3451, 2634, 3150, 2810, 3303, 2573, 3460, 2615, 3394, 2828, 3329, 4377, 4499, 3555, 2974, 3782, 3629, 3578, 3885, 2817, 3248, 2954, 3334, 3571, 3345, 3551, 3384, 3422, 1357, 1844, 2530, 2973, 4418, 4081, 3951, 1764, 1671, 1852, 334, 1843, 3449, 3185, 3399, 2786, 3055, 3472, 3397, 2601, 3564, 3277, 4373, 3548, 3179, 3407, 3841, 3347, 3142, 4255, 4431, 3241, 3077, 2700, 3147, 2648, 3283, 2829, 3278, 2581, 2536, 4363, 2848, 3410, 2797, 2523, 2520, 2721, 3496, 2571, 3198, 3219, 3030, 2673, 2921, 3837, 3301, 3322, 2705, 3239, 2949, 3369, 3396, 2892, 2897, 2766, 3174, 3297, 2550, 2889, 2933, 2793, 2627, 2677, 3119, 2596, 3226, 3172, 3089, 2868, 2839, 3942, 3120, 3286, 2843, 3465, 1564, 3946, 4222, 1504, 3999, 2682, 1875, 2865, 3539, 3168, 2864, 3308, 3557, 2940, 3109, 3503, 2625, 3455, 3114, 2595, 3331, 2978, 2518, 2521, 4079, 3024, 3573, 2952, 2653, 1769, 3180, 2813, 2652, 2600, 2816, 3201, 3188, 3270, 2997, 2992, 3009, 3520, 2936, 3275, 3165, 3447, 3131, 3305, 2809, 2792, 2729, 2814, 2619, 3266, 2825, 3066, 2857, 2998, 3064, 2681, 3035, 3279, 2764, 3480, 3127, 2912, 3010, 2607, 3211, 3111, 3041, 1573, 3909, 4269, 3487, 3489, 3019, 335, 1266, 1415, 2980, 3428, 2444, 3435, 3482, 3020, 2748, 2646, 2787, 2760, 2563, 3085, 3133, 3158, 3170, 2703, 3494, 2556, 2552, 3395, 3245, 3404, 2675, 2791, 2252, 4845, 1911, 4856, 908, 1935, 4711, 4728, 2460, 4517, 2749, 3341, 3355, 2575, 2942, 2886, 2758, 2594, 3495, 2884, 3516, 3042, 2737, 2923, 3563, 2855, 3476, 2611, 2937, 3383, 3497, 3402, 3162, 2662, 2875, 3223, 2878, 2079, 1808, 3285, 2757, 3057, 2951, 3519, 2579, 2853, 3387, 3401, 3493, 3393, 1608, 3365, 2885, 3574, 3081, 3007, 3568, 3152, 3367, 3358, 336, 2268, 3468, 3290, 3550, 3132, 2726, 2879, 3190, 3309, 2613, 2765, 3106, 1355, 3454, 2851, 2881, 3232, 3458, 3326, 3353, 2927, 3212, 2950, 3376, 3208, 3062, 3612, 3195, 3385, 2686, 2602, 3569, 3123, 2727, 1622, 2821, 2636, 2750, 2850, 3050, 2925, 3336, 3540, 2689, 3139, 2526, 3361, 3022, 3427, 3107, 3140, 3371, 3276, 2831, 3501, 2924, 3366, 3199, 3101, 3321, 3499, 2917, 2683, 2800, 2812, 3340, 3227, 3148, 3657, 4446, 1746, 1464, 1886, 2666, 3246, 3130, 3560, 3236, 2730, 3572, 1607, 3689, 2968, 1457, 1500, 909, 337, 1184, 3450, 2577, 2567, 2532, 3415, 2934, 2984, 2568, 4147, 3002, 2986, 910, 2979, 2542, 2492, 1762, 4472, 1472, 1529, 2319, 2131, 4057, 2048, 1976, 4507, 1583, 338, 2078, 2372, 339, 911, 1711, 340, 912, 2013, 913, 2277, 914, 341, 915, 4672, 4902, 916, 342, 1594, 4440, 917, 343, 344, 4559, 918, 2233, 919, 345, 920, 346, 921, 922, 347, 2226, 348, 2180, 2298, 349, 350, 2099, 2036, 351, 4808, 923, 924, 4498, 1518, 3728, 3637, 3570, 3429, 4091, 2870, 2995, 4338, 3205, 2880, 3261, 1994, 3968, 4291, 4204, 4071, 4034, 1742, 2820, 3912, 3287, 1218, 1190, 4145, 353, 2422, 354, 355, 925, 1782, 2184, 2261, 2490, 926, 927, 928, 4630, 2137, 3610, 356, 357, 4729, 358, 359, 4224, 1918, 1959, 1840, 3736, 2471, 1770, 929, 930, 931, 4155, 360, 361, 362, 932, 363, 364, 1279, 2289, 365, 1543, 366, 2156, 2472, 367, 4049, 1633, 1722, 368, 369, 1495, 1566, 370, 4967, 372, 373, 1211, 1873, 2101, 2494, 1726, 374, 1442, 933, 1748, 4142, 1434, 1358, 1191, 3732, 4110, 4039, 4411, 4506, 4270, 4156, 3780, 4036, 4030, 4016, 1550, 3899, 1247, 1855, 1181, 3919, 1639, 3664, 1244, 4140, 3930, 4117, 4189, 4001, 3799, 3643, 3619, 1240, 1686, 1479, 1307, 1575, 4296, 1665, 3871, 4135, 1605, 4408, 3604, 1274, 4149, 1313, 3741, 1938, 3709, 1727, 3893, 1280, 3622, 1784, 3834, 1752, 1983, 1743, 3979, 4461, 4113, 3817, 4232, 1340, 1489, 4214, 3902, 1857, 2316, 1904, 1219, 1486, 1512, 1481, 1516, 3820, 3789, 4252, 4047, 4330, 4082, 4094, 1574, 1248, 4078, 1872, 1426, 3785, 3687, 4318, 4243, 3866, 3704, 4172, 1621, 4315, 1192, 1513, 1856, 3324, 2769, 2678, 1561, 3296, 375, 2343, 376, 377, 1395, 1584, 4093, 4453, 3940, 3778, 4374, 4210, 4009, 4264, 4339, 4368, 1738, 378, 1610, 4194, 4474, 4013, 4266, 1771, 1759, 1922, 3860, 3832, 1349, 1381, 3663, 1642, 1185, 4356, 3932, 1233, 4212, 3858, 1198, 4192, 3611, 1919, 1819, 3790, 3712, 1969, 4095, 1887, 4468, 1720, 4247, 934, 1790, 2002, 1657, 1663, 1336, 3894, 1554, 1494, 1405, 3576, 4314, 3695, 1851, 1850, 4362, 1815, 3845, 4511, 3656, 3638, 1406, 1596, 4454, 1443, 1661, 935, 4504, 1359, 1734, 3650, 1910, 1305, 1648, 3831, 4435, 1208, 1988, 4451, 1993, 1986, 3849, 1718, 4068, 1835, 1425, 1428, 1282, 4380, 1658, 1452, 1687, 4024, 379, 4072, 3791, 4491, 4323, 4014, 1304, 1440, 1511, 1981, 1676, 1547, 4422, 1283, 3861, 1383, 3644, 3691, 4259, 1749, 1418, 1176, 4216, 1924, 1421, 3992, 4423, 4253, 1618, 1871, 1256, 3748, 4119, 1297, 1586, 1251, 1299, 1954, 4450, 3990, 4029, 4097, 3890, 3796, 1389, 3711, 4344, 1578, 1476, 4343, 1202, 4413, 4384, 3808, 1647, 1475, 3892, 3674, 1739, 3926, 3595, 1943, 3756, 4405, 3973, 4109, 4159, 3744, 4387, 1960, 4275, 3781, 1535, 1210, 4492, 4365, 4118, 3655, 3886, 4278, 4383, 4485, 1392, 3751, 3931, 3986, 3678, 1249, 4353, 4208, 3710, 4238, 4213, 3969, 4436, 3175, 4128, 2970, 1228, 3534, 3437, 3406, 3641, 3639, 3954, 4335, 3995, 3582, 4475, 3784, 4470, 4010, 3802, 3941, 4427, 4396, 4348, 3587, 3818, 3864, 3956, 3863, 3731, 3814, 4067, 4354, 4350, 4334, 3821, 1932, 3929, 4171, 1258, 3824, 3631, 4465, 4494, 1320, 1398, 3828, 1204, 1223, 1284, 1685, 3773, 4209, 3014, 4462, 4246, 4190, 4312, 4023, 3760, 3753, 1178, 3884, 2783, 4038, 3545, 2916, 3112, 2834, 3880, 3673, 4102, 4399, 4048, 3752, 4207, 1235, 3943, 4355, 4087, 4100, 4327, 4037, 4163, 3918, 4486, 1243, 3933, 4178, 1662, 1643, 4152, 3634, 3617, 4445, 4303, 1370, 3838, 4199, 4284, 1213, 4382, 1399, 1187, 3714, 1828, 4487, 3615, 1842, 1501, 3746, 4018, 4420, 3606, 4121, 3724, 3935, 4419, 4282, 1955, 1949, 4310, 4488, 1577, 4127, 1288, 1171, 3670, 4052, 3627, 3777, 936, 1371, 3685, 1325, 1940, 380, 4482, 4258, 3812, 1581, 1860, 4124, 4508, 4500, 3652, 3972, 1309, 1630, 1528, 3717, 1217, 3692, 4430, 3764, 4316, 4285, 3645, 3971, 4421, 1172, 4026, 2740, 3125, 3546, 1725, 1206, 3842, 4404, 3690, 3962, 4513, 4340, 4329, 4410, 3703, 4136, 1763, 1487, 3589, 3907, 4153, 2707, 3730, 4426, 4180, 4041, 3923, 4444, 3851, 4429, 4361, 1441, 4394, 4302, 3758, 4510, 3742, 1868, 4077, 1710, 1939, 1335, 1666, 1407, 4187, 1193, 1188, 1196, 1724, 1717, 1200, 1646, 1997, 1975, 1701, 4280, 1613, 4006, 1984, 1351, 3653, 3833, 1593, 2561, 4442, 3900, 4298, 1761, 4388, 1820, 1597, 4317, 4249, 1341, 1203, 1680, 4441, 3628, 3725, 1945, 937, 4206, 1588, 1439, 3794, 4447, 1838, 3776, 3658, 4064, 1377, 4011, 4272, 4503, 1324, 1367, 3594, 3680, 1300, 1750, 3913, 3774, 1877, 1987, 1862, 3998, 1380, 4185, 3686, 3696, 4463, 1350, 4008, 4230, 3853, 4244, 4083, 381, 1909, 3897, 1546, 382, 3613, 3273, 3452, 3525, 1229, 4105, 3835, 383, 1263, 1234, 3970, 1492, 3856, 3586, 1175, 4321, 4020, 4144, 1224, 1199, 3667, 2778, 4412, 4407, 1812, 1810, 3823, 1416, 1427, 1507, 1878, 4333, 3146, 4281, 4211, 1179, 3843, 1669, 1677, 1524, 1525, 1974, 384, 1979, 1456, 1239, 4167, 3740, 1876, 1388, 1967, 1474, 385, 1342, 1471, 4176, 1232, 1989, 4125, 1741, 1508, 1580, 4060, 4378, 1576, 1212, 1893, 3921, 3585, 1174, 1396, 4061, 4015, 1207, 3698, 3825, 3922, 4021, 4181, 1598, 1916, 1429, 4502, 4231, 1321, 4390, 3693, 3734, 1382, 3684, 1747, 3806, 3896, 3635, 1768, 4025, 3976, 3840, 3963, 4286, 1502, 3836, 4161, 3659, 3743, 4130, 3605, 1385, 1783, 4392, 4328, 1316, 4173, 4265, 1246, 1985, 1629, 1829, 1737, 3826, 1473, 1992, 1883, 1656, 1837, 1914, 1839, 1834, 3984, 4495, 3910, 4160, 3671, 4184, 4132, 4250, 1503, 1237, 1523, 1417, 4063, 1562, 3977, 1971, 1707, 1847, 1792, 3769, 4074, 1534, 4239, 4003, 3915, 1689, 1776, 1599, 1265, 1410, 1823, 1498, 1329, 939, 386, 940, 1655, 3874, 4261, 3626, 1791, 3579, 1644, 3936, 4054, 4260, 4359, 4131, 4297, 4357, 4022, 3770, 4046, 1222, 1996, 3788, 4169, 1925, 3953, 4228, 4226, 4277, 4101, 1889, 1369, 3797, 4088, 4019, 3771, 3632, 1402, 388, 1520, 1767, 1466, 1194, 4137, 1908, 1927, 1758, 3772, 3661, 4186, 4174, 1170, 3850, 1315, 1611, 1530, 1859, 2209, 4183, 1408, 1403, 941, 4033, 3623, 3596, 1461, 1848, 1173, 1928, 1459, 1765, 1826, 3719, 1931, 3584, 4004, 3591, 3967, 4168, 3957, 3878, 4165, 4191, 3980, 4058, 4200, 4336, 3958, 1260, 4051, 3798, 4032, 1774, 4322, 3991, 4106, 1641, 1570, 3978, 3965, 4464, 3813, 4154, 1365, 4257, 3846, 4345, 4379, 3603, 1693, 3937, 3801, 1787, 1214, 4483, 4201, 1898, 1845, 1226, 1220, 4245, 1347, 3867, 1900, 3640, 3916, 4089, 1209, 3745, 3988, 3975, 4236, 4075, 4146, 4256, 4308, 4000, 4148, 3588, 3868, 4403, 3883, 4326, 4393, 3895, 4237, 3955, 3727, 4005, 4092, 4372, 4283, 1553, 3805, 4151, 1281, 1681, 4489, 3982, 4437, 3597, 4342, 3872, 3987, 4490, 3876, 3668, 4300, 1679, 1242, 3598, 3583, 3647, 389, 4304, 3793, 3779, 1937, 1907, 4042, 3648, 3996, 3800, 4367, 4099, 1807, 3887, 4428, 1625, 1390, 1884, 1682, 4364, 4306, 3869, 1278, 1672, 942, 1505, 1542, 1709, 1915, 3600, 3914, 1968, 3948, 1670, 3811, 1865, 1362, 943, 1716, 3961, 1506, 4221, 1376, 944, 1683, 4276, 1445, 1721, 1632, 3607, 1328, 1455, 1913, 1497, 1317, 1951, 1778, 1379, 3768, 4225, 1668, 2383, 945, 390, 391, 4406, 4341, 1480, 392, 393, 394, 395, 1714, 1422, 396, 2043, 946, 2265, 397, 3618, 4433, 1177, 3898, 398, 2251, 947, 948, 2212, 949, 950, 399, 951, 400, 1965, 4640, 2129, 2345, 4471, 952, 953, 402, 2475, 403, 404, 4758, 955, 2437, 4139, 1482, 3602, 4434, 3721, 1592, 1825, 1698, 1519, 1352, 4202, 4409, 1977, 1917, 405, 406, 407, 408, 956, 2272, 957, 2267, 1631, 1684, 409, 2054, 3889, 958, 410, 2117, 411, 959, 412, 960, 2443, 4712, 4619, 2285, 414, 415, 961, 2352, 2417, 962, 1905, 416, 963, 417, 418, 3675, 1833, 3974, 419, 964, 421, 965, 966, 967, 968, 2365, 969, 970, 422, 1897, 2056, 2309, 4733, 1272, 4754, 2207, 971, 423, 4133, 3830, 4865, 972, 424, 973, 425, 2068, 4955, 426, 974, 427, 1708, 4676, 428, 4141, 430, 3749, 431, 1619, 975, 4044, 3590, 1944, 4126, 1923, 1706, 432, 976, 977, 978, 4867, 4400, 433, 434, 1606, 2143, 979, 435, 980, 2604, 2895, 981, 436, 3448, 4959, 2188, 437, 438, 1692, 982, 2388, 2433, 2243, 983, 2035, 2120, 4940, 439, 440, 2474, 442, 2052, 4764, 3862, 4055, 4358, 984, 2435, 4589, 2276, 2401, 985, 1664, 443, 2073, 2405, 986, 4309, 4045, 3854, 3682, 2491, 444, 445, 1972, 2688, 4366, 3425, 3231, 3649, 2759, 2724, 3873, 3755, 1216, 3599, 3775, 2754, 2606, 3471, 3234, 2565, 2803, 2562, 2684, 3411, 3405, 2690, 1255, 3694, 446, 3985, 3535, 1306, 4084, 3282, 447, 1353, 2168, 1780, 987, 988, 989, 2126, 448, 449, 2107, 450, 2031, 990, 451, 452, 991, 1485, 453, 992, 1728, 993, 4703, 994, 995, 454, 1696, 996, 2039, 455, 997, 998, 3116, 1869, 456, 4759, 2500, 4798, 2262, 4562, 457, 1386, 999, 458, 4768, 4982, 4778, 2040, 1000, 4981, 3879, 2698, 459, 460, 1001, 461, 1447, 462, 1002, 2042, 2339, 1003, 463, 464, 4425, 1645, 465, 1004, 467, 468, 469, 1231, 1468, 470, 471, 2496, 472, 473, 1005, 474, 475, 2108, 4725, 476, 1273, 1007, 1744, 1488, 1659, 477, 478, 4598, 1604, 4753, 2493, 479, 1008, 1009, 480, 1011, 1012, 1013, 1014, 481, 4313, 482, 483, 1499, 484, 1015, 4761, 2091, 2513, 1016, 4073, 1777, 2172, 485, 2205, 4592, 4545, 486, 1458, 4274, 2122, 4905, 5003, 4599, 4796, 2152, 4539, 4528, 4904, 4842, 4986, 4846, 4650, 4595, 2195, 4681, 2142, 487, 4710, 1775, 4205, 1526, 4586, 4602, 4518, 1697, 1017, 2000, 4692, 4795, 2480, 488, 2335, 489, 4969, 1894, 1882, 1817, 1880, 490, 1018, 3917, 3616, 4311, 1800, 4473, 4085, 4401, 1310, 3783, 3765, 1538, 3870, 491, 1948, 3699, 1735, 3792, 4290, 2074, 492, 2202, 5001, 2136, 493, 2211, 4532, 494, 2421, 495, 4090, 2378, 2104, 2210, 2247, 2478, 2047, 496, 4620, 4978, 4614, 1019, 2012, 1803, 3642, 497, 1322, 1020, 498, 1021, 2235, 2302, 2488, 4665, 4540, 5006, 499, 2049, 4685, 500, 501, 1022, 502, 1333, 503, 1023, 4686, 4804, 504, 4727, 505, 506, 4938, 4805, 2065, 1890, 4891, 1024, 507, 508, 509, 1025, 510, 1026, 3608, 1732, 511, 2397, 1864, 1816, 1531, 512, 513, 2451, 3636, 5012, 4892, 514, 1699, 4593, 1027, 4987, 515, 2495, 4660, 1028, 516, 1029, 2409, 1366, 2112, 2178, 2124, 2376, 5011, 4572, 4957, 4789, 4543, 4664, 4678, 2093, 4746, 2489, 4922, 2145, 1030, 4832, 4950, 1261, 4027, 3478, 3763, 2959, 1293, 2462, 517, 3197, 1595, 3413, 2238, 1031, 2228, 518, 2057, 2305, 2133, 2061, 4526, 4617, 1033, 2429, 2311, 1675, 4785, 1797, 519, 4578, 2271, 2466, 2148, 2420, 520, 4854, 2381, 2315, 2284, 4813, 521, 1034, 522, 523, 1999, 3759, 1215, 4122, 1730, 524, 525, 526, 3966, 4573, 5008, 1035, 527, 4973, 2508, 528, 3911, 529, 3289, 1821, 530, 531, 2426, 1036, 532, 1874, 533, 534, 1037, 535, 1038, 536, 1039, 537, 538, 539, 1040, 3767, 1929, 1042, 3683, 2100, 4853, 2300, 2165, 540, 541, 1043, 4906, 542, 1338, 2292, 2021, 1616, 1901, 1796, 1517, 4331, 4332, 4466, 2719, 3803, 4123, 4233, 1824, 3129, 3087, 3505, 4158, 4254, 1449, 1044, 3720, 4351, 4414, 1673, 3453, 3254, 2501, 1649, 543, 544, 545, 546, 1045, 547, 4240, 3580, 4680, 1046, 548, 2062, 1047, 550, 2598, 551, 552, 553, 3819, 1259, 4062, 1048, 554, 2841, 1049, 1050, 3515, 2219, 1433, 1323, 4301, 555, 556, 1051, 557, 558, 1052, 1053, 3738, 1567, 559, 1054, 1270, 3857, 1055, 2151, 560, 2175, 2089, 1056, 2198, 2193, 1257, 1238, 3662, 561, 2186, 1057, 4637, 562, 1058, 563, 4872, 2097, 564, 1059, 565, 566, 1060, 1061, 2231, 4203, 1899, 3981, 1062, 1303, 4116, 567, 1063, 568, 569, 570, 2367, 1946, 3620, 1064, 1514, 4002, 3679, 3964, 3707, 3666, 1348, 4273, 1804, 4497, 571, 1401, 4438, 1895, 1264, 572, 1912, 573, 3939, 4170, 4056, 1271, 1065, 1521, 1221, 1066, 1451, 1654, 1067, 3934, 4080, 4352, 574, 1700, 3739, 1565, 1419, 1811, 3950, 1690, 1397, 3716, 1569, 1465, 1437, 1674, 4337, 1285, 4268, 1183, 3726, 3881, 4134, 4347, 4012, 3938, 4066, 4198, 4416, 4164, 3630, 4229, 4292, 4193, 4325, 4375, 4371, 4432, 4215, 1753, 3944, 1409, 4195, 1729, 4223, 1540, 4455, 1068, 1069, 4512, 1723, 1070, 3750, 3633, 4070, 4104, 4162, 4235, 1863, 4346, 1881, 1814, 1572, 2418, 575, 4443, 3761, 1346, 1587, 1072, 3592, 576, 1891, 4469, 2430, 1275, 577, 1950, 1963, 4129, 1073, 1296, 1360, 1551, 3733, 4111, 3993, 4108, 3949, 1287, 1713, 1556, 1736, 1995, 1435, 1424, 1830, 1705, 1861, 1197, 1254, 4120, 1545, 4417, 1469, 1292, 2279, 1785, 1236, 4293, 1827, 3839, 3983, 4395, 1957, 2222, 578, 3928, 4295, 3715, 3855, 3609, 1990, 4076, 4175, 3927, 1757, 1650, 4299, 1773, 2004, 1267, 1364, 579, 1462, 1879, 4007, 3729, 3665, 3722, 1691, 1712, 1074, 1624, 1751, 1394, 3924, 3952, 580, 581, 2003, 1343, 2203, 1559, 1250, 1555, 582, 2395, 4114, 1818, 1075, 583, 1076, 1077, 1704, 4448, 584, 4882, 1078, 1079, 1786, 585, 3354, 1832, 586, 3432, 2891, 587, 588, 4583, 2505, 1903, 2077, 4936, 4658, 4830, 2446, 1080, 2278, 1081, 1082, 4459, 1083, 589, 1563, 1084, 2255, 2113, 590, 591, 1085, 592, 2308, 593, 594, 2274, 595, 4931, 2407, 1858, 596, 597, 598, 1453, 2559, 2590, 2738, 4478, 4069, 1809, 1327, 4150, 3260, 3481, 3672, 3625, 2008, 4439, 3852, 3997, 1411, 599, 3847, 4993, 1268, 4050, 3377, 4424, 1496, 4143, 4493, 3492, 1962, 1412, 2455, 600, 2457, 1086, 601, 4017, 4477, 1794, 2483, 2291, 602, 4263, 3072, 2009, 2199, 1754, 1087, 1088, 3888, 603, 604, 4777, 2324, 605, 1368, 3827, 4103, 606, 607, 1089, 2220, 4549, 1090, 1571, 1091, 1438, 608, 1092, 609, 610, 611, 1093, 612, 1094, 3701, 4389, 613, 4897, 1603, 614, 1095, 5000, 615, 616, 2263, 1332, 1715, 4369, 1652, 1096, 617, 1541, 618, 1921, 1733, 1373, 1870, 619, 4218, 1798, 2387, 1097, 1098, 1099, 1100, 620, 1702, 621, 622, 4801, 2398, 2239, 1101, 1667, 1384, 623, 4745, 3700, 1788, 1600, 624, 2098, 625, 4550, 4721, 4960, 4878, 2473, 4792, 4675, 1102, 1423, 626, 2771, 627, 1339, 3875, 628, 629, 3070, 4565, 2118, 4818, 2557, 2795, 2906, 2103, 4869, 2029, 3299, 3118, 4932, 4838, 4901, 4657, 4646, 4875, 4627, 4515, 4876, 4965, 4605, 4576, 2028, 4985, 4850, 1103, 4747, 1614, 1947, 2237, 630, 631, 4618, 4479, 3766, 632, 1104, 1105, 4886, 1106, 2432, 633, 1107, 4530, 634, 2371, 4651, 1108, 4536, 635, 1813, 636, 2431, 4866, 4991, 4814, 4560, 4956, 637, 4555, 1109, 4941, 4577, 2213, 638, 639, 3706, 1110, 640, 1111, 641, 4581, 4893, 4831, 2481, 4644, 4734, 2190, 4524, 4881, 4837, 4888, 4648, 642, 4807, 4896, 4868, 2374, 1112, 4823, 2164, 1113, 3735, 3390, 1694, 3431, 2838, 3483, 3464, 3848, 2558, 3314, 3086, 3029, 2956, 3517, 2651, 2914, 2680, 2632, 3121, 3100, 3528, 3526, 3084, 4220, 3304, 2846, 1186, 3235, 2903, 3559, 2687, 3409, 3237, 2900, 2999, 3349, 3171, 2752, 3262, 3504, 3047, 4376, 3193, 3430, 2525, 2670, 2911, 3508, 2776, 2697, 3200, 2790, 3323, 2543, 2874, 2614, 3904, 3373, 3054, 2617, 4242, 3621, 2708, 4179, 4398, 3959, 4935, 1269, 3095, 1286, 3624, 4481, 1432, 3511, 2735, 4381, 3295, 1585, 2390, 1568, 1114, 1766, 3221, 2643, 2739, 643, 4735, 4760, 1115, 4918, 4688, 3920, 644, 4723, 4949, 4748, 4607, 4719, 1116, 645, 646, 4611, 2353, 4645, 4998, 2307, 647, 1801, 4279, 3762, 1637, 1509, 4843, 4797, 4590, 4995, 4541, 2200, 4580, 4858, 648, 649, 2502, 1117, 4780, 4800, 4551, 4674, 1118, 1119, 2965, 2369, 2695, 3293, 650, 651, 4730, 4862, 4722, 4944, 1120, 652, 1121, 4983, 4784, 4877, 4643, 653, 654, 4909, 1122, 3264, 655, 2076, 4849, 656, 657, 2447, 658, 659, 4035, 2910, 3391, 2808, 3099, 2913, 3676, 2852, 3284, 2731, 1609, 2375, 2201, 3537, 3994, 1319, 4467, 1802, 1227, 1623, 660, 4844, 2086, 4770, 2192, 1123, 661, 2364, 662, 663, 664, 1124, 1125, 665, 2487, 4899, 2138, 1126, 666, 667, 4569, 4554, 4917, 2322, 1127, 1128, 1129, 668, 669, 1130, 670, 1131, 1527, 1132, 671, 1772, 2314, 1133, 1134, 2470, 1135, 672, 2236, 4716, 673, 4600, 2196, 2456, 4606, 4910, 2123, 1136, 1137, 2358, 5005, 2208, 4952, 4945, 1933, 1731, 1793, 675, 676, 3342, 1138, 677, 4597, 4870, 1140, 4990, 4954, 4916, 678, 1141, 4737, 4527, 2253, 4531, 679, 1142, 1143, 680, 4771, 1144, 4638, 681, 4705, 4525, 4522, 4898, 2325, 2415, 5004, 1145, 682, 683, 1146, 684, 685, 2445, 686, 687, 4861, 2157, 688, 3822, 689, 690, 4743, 691, 1147, 1601, 692, 1148, 693, 4537, 4825, 4625, 4621, 3905, 694, 695, 1414, 1149, 696, 2027, 2159, 4756, 4793, 4575, 2160, 4828, 4731, 4718, 4802, 4750, 1150, 2081, 2258, 697, 1795, 1372, 1695, 1866, 1151, 4115, 1719, 2280, 4662, 698, 2176, 2194, 2217, 1920, 699, 700, 701, 4999, 1544, 4739, 702, 703, 4031, 4305, 1636, 1393, 2010, 3810, 4452, 3677, 4227, 1277, 1400, 4402, 4157, 4197, 1337, 1253, 1532, 4028, 3989, 2449, 4715, 704, 2050, 1493, 1854, 1902, 1510, 1152, 4824, 705, 2340, 4182, 706, 2442, 2484, 707, 708, 709, 4667, 1153, 2412, 4476, 2053, 710, 1375, 711, 712, 713, 4829, 4738, 4811, 4570, 4961, 1245, 714, 2045, 4707, 715, 2169, 4713, 1841, 4234, 4924, 1154, 1314, 4096, 2023, 716, 717, 4895, 718, 1155, 719, 720, 2063, 1311, 721, 4642, 722, 4885, 4666, 2249, 4217, 1156, 723, 1157, 1627, 2116, 4566, 2287, 1158, 2330, 4826, 4622, 4740, 724, 4700, 725, 1159, 5013, 4894, 726, 2434, 1953, 1160, 1201, 727, 3787, 2046, 1161, 728, 729, 2485, 2044, 4568, 3747, 730, 731, 2024, 1846, 2507, 2368, 2019, 2333, 3815, 2005, 2266, 1964, 2347, 2385, 732, 2177, 2059, 4958, 1822, 4815, 1262, 2094, 4480, 1537, 1291, 2419, 1318, 2283, 4976, 4294, 2486, 4926, 1582, 2162, 733, 4587, 734, 735, 3439, 2833, 4287, 4509, 4505, 4267, 3697, 3272, 4112, 2967, 3651, 1991, 1805, 1628, 3705, 2479, 736, 1195, 4863, 1163, 3859, 1164, 2394, 1165, 2355, 2351, 4679, 4835, 2259, 4839, 4571, 1166, 4968, 2250, 4912, 2423, 737, 1167, 4989, 4684, 4669, 4552, 4612, 2127, 1745, 1973, 4767, 1168, 2273, 2310, 3807, 4307, 1169, 2303, 1454, or 1781.

37. The VP capsid polypeptide of claim 1, wherein X³, X⁶, and X¹ of SEQ ID NO: 5014 are basic amino acid residues.

38. The VP capsid polypeptide of claim 1, wherein X³, X⁶, and X⁴ of SEQ ID NO: 5014 are basic amino acid residues.

39. The VP capsid polypeptide of claim 37 or claim 38, wherein X³, X⁶, X¹, and X⁴ of SEQ ID NO: 5014 are basic amino acid residues.

40. A viral protein (VP) capsid polypeptide comprising a 581 to 589 region corresponding to residues 581 to 589 of an AAV5 VP1 polypeptide, wherein the 581 to 589 region of the VP capsid polypeptide comprises at least two basic amino acid residues and no more than one acidic amino acid residue.

41. The VP capsid polypeptide of claim 1, wherein the VP capsid polypeptide comprises one or more features selected from the group consisting of:
(a) the 581 to 589 region comprises two or more basic amino acid residues,
(b) X³, X⁶, X¹, or X⁴ of SEQ ID NO: 5014, or any combination thereof are basic amino acid residues, and
(c) the 581 to 589 region comprises no more than one acidic amino acid residue.

42. The VP capsid polypeptide of claim 41, wherein the VP capsid polypeptide comprises two or more of the features.

43. The VP capsid polypeptide of claim 41, wherein the VP capsid polypeptide comprises three of the features.

44. The VP capsid polypeptide of any one of claims 40-43, wherein the acidic amino acid residue is D or E.

45. The VP capsid polypeptide of any one of claims 37-44, wherein the basic amino acid residues are K, R, or H.

46. A viral protein (VP) capsid polypeptide comprising a 581 to 589 region corresponding to residues 581 to 589 of an AAV5 VP1 polypeptide, wherein the 581 to 589 region comprises a sequence having at least 85% sequence identity to any one of SEQ ID NO: 14-SEQ ID NO: 2013.

47. The VP capsid polypeptide of claim 46, wherein the 581 to 589 region comprises a sequence of any one of SEQ ID NO: 14-SEQ ID NO: 2013.

48. A viral protein (VP) capsid polypeptide comprising a 581 to 589 region corresponding to residues 581 to 589 of an AAV5 VP1 polypeptide, wherein the 581 to 589 region comprises a sequence having at least 85% sequence identity to any one of SEQ ID NO: 2514-SEQ ID NO: 4513.

49. The VP capsid polypeptide of claim 48, wherein the 581 to 589 region comprises a sequence of any one of SEQ ID NO: 2514-SEQ ID NO: 4513.

50. The VP capsid polypeptide of any one of claims 1-49, wherein the 581 to 589 region confers increased retina tissue tropism compared to a wild type AAV5 VP capsid polypeptide of SEQ ID NO: 1.

51. The VP capsid polypeptide of claim 50, wherein the retina tissue tropism is at least 1.5-fold, at least 2-fold, at least 2.5-fold, at least 3-fold, at least 3.5-fold, at least 4-fold, at least 5-fold, at least 10-fold, at least 20-fold, at least 50-fold, at least 75-fold, at least 100-fold, at least 200-fold, or at least 500-fold higher than the wild type AAV5 VP capsid polypeptide of SEQ ID NO: 1.

52. The VP capsid polypeptide of claim 50 or claim 51, wherein the 581 to 589 region further confers increased retinal pigment epithelium tissue tropism compared to a wild type AAV5 VP capsid polypeptide of SEQ ID NO: 1.

53. The VP capsid polypeptide of any one of claims 1-52, wherein the 581 to 589 region confers decreased photoreceptor tissue-tropism compared to a wild type AAV5 VP capsid polypeptide of SEQ ID NO: 1.

54. The VP capsid polypeptide of claim 53, wherein the photoreceptor tissue comprises rod photoreceptor cells, cone photoreceptor cells, or a combination thereof.

55. The VP capsid polypeptide of any one of claims 1-54, wherein the VP capsid polypeptide comprises an amino acid sequence at least 70%, at least 80%, at least 85%, at least 90%, at least 95%, at least 97%, at least 98%, at least 98.5%, at least 99%, or at least 99.5% identical to SEQ ID NO: 1.

56. The VP capsid polypeptide of any one of claims 1-55, wherein the VP capsid polypeptide has a sequence of SEQ ID NO: 2, wherein residues 581 to 589 of SEQ ID NO: 2 (X¹X²X³X⁴X⁵X⁶X⁷X⁸X⁹) correspond to the 581 to 589 region.

57. The VP capsid polypeptide of any one of claims 1-56, wherein the VP capsid polypeptide is capable of assembling into a recombinant viral capsid.

58. The VP capsid polypeptide of any one of claims 1-57, comprising at least one amino acid substitution as compared to each of SEQ ID NO: 3, SEQ ID NO: 4, SEQ ID NO: 5, SEQ ID NO: 6, SEQ ID NO: 7, and SEQ ID NO: 8.

59. The VP capsid polypeptide of any one of claims 1-58, wherein the 581 to 589 region comprises a net positive charge at pH 7.4.

60. The VP capsid polypeptide of any one of claims 1-59, wherein the VP capsid polypeptide further comprises one or more mutations outside of the 581 to 589 region relative to a wild type VP capsid polypeptide of SEQ ID NO: 1.

61. The VP capsid polypeptide of any one of claims 1-60, wherein the 581 to 589 region confers on a recombinant viral capsid assembled from the VP capsid polypeptide improved stability compared to a wild type AAV capsid comprising a peptide of SEQ ID NO: 1.

62. The VP capsid polypeptide of any one of claims 1-61, wherein the 581 to 589 region confers lower toxicity upon administration to a subject compared to a wild type VP capsid polypeptide of SEQ ID NO: 1.

63. The VP capsid polypeptide of any one of claims 1-62, wherein the VP capsid polypeptide further comprises one or more mutations outside of the 581 to 589 region that contributes to reduced production of neutralizing antibodies relative to a wild type VP capsid polypeptide of SEQ ID NO: 1.

64. The VP capsid polypeptide of any one of claims 1-63, wherein the VP capsid polypeptide further comprises one or more mutations outside of the 581 to 589 region that improves manufacturability relative to a wild type VP capsid polypeptide of SEQ ID NO: 1.

65. A recombinant viral adeno-associated virus (rAAV) capsid comprising the VP capsid polypeptide of any one of claims 1-64, wherein the rAAV capsid preferentially targets retina tissue.

66. The rAAV capsid of claim 65, further comprising a VP2 polypeptide comprising the 581 to 589 region and a VP3 polypeptide comprising the 581 to 589 region.

67. A recombinant adeno-associated virus (rAAV), comprising the VP capsid polypeptide of any one of claims 1-64 assembled into a recombinant viral capsid and a payload encapsidated by the recombinant viral capsid.

68. The rAAV of claim 67, wherein the rAAV preferentially targets retina tissue.

69. The rAAV of claim 67 or claim 68, further comprising a VP2 polypeptide comprising the 581 to 589 region and a VP3 polypeptide comprising the 581 to 589 region.

70. The rAAV of any one of claims 67-69, wherein the payload encodes a therapeutic polynucleotide or a therapeutic peptide.

71. The rAAV of claim 70, wherein the payload encodes a guide RNA, a tRNA, a suppressor tRNA, a siRNA, a miRNA, an mRNA, a shRNA, a circular RNA, or an antisense oligonucleotide (ASO), a ribozyme, a DNAzyme, an aptamer, or any combination thereof.

72. The rAAV of claim 71, wherein the guide RNA is a CRISPR/Cas guide RNA or an ADAR guide RNA.

73. The rAAV of claim 71, wherein the payload encodes a component of a CRISPR/Cas system, an adenosine deaminase acting on RNA (ADAR) enzyme, a transcriptional activator, or a transcriptional repressor.

74. A pharmaceutical composition comprising the VP capsid polypeptide of any one of claims 1-64, the rAAV capsid of claim 65 or claim 66, or the rAAV of any one of claims 67-73.

75. A method of delivering a payload to a retina tissue of a subject, the method comprising administering a recombinant adeno-associated virus (rAAV) to the subject via intravitreal administration, wherein the rAAV encapsidates the payload, and wherein the rAAV comprises a VP capsid polypeptide comprising a 581 to 589 region comprising at least one substitution relative to SEQ ID NO: 9, and wherein the 581 to 589 region comprises one or more basic amino acid residues.

76. A method of delivering a payload to a retina tissue of a subject, the method comprising administering a recombinant adeno-associated virus (rAAV) to the subject via intravitreal administration, wherein the rAAV encapsidates the payload, and wherein the rAAV comprises a VP capsid polypeptide comprising a 581 to 589 region corresponding to residues 581 to 589 of an AAV5 VP1 polypeptide, wherein the 581 to 589 region comprises a sequence having at least 85% sequence identity to any one of SEQ ID NO: 14-SEQ ID NO: 2013 or SEQ ID NO: 2514-SEQ ID NO: 4513.

77. A method of delivering a payload to a retina tissue of a subject, the method comprising administering a recombinant adeno-associated virus (rAAV) to the subject via intravitreal administration, wherein the rAAV encapsidates the payload, and wherein the rAAV comprises the VP capsid polypeptide of any one of claims 1-64.

78. A method of delivering a payload to a retina tissue of a subject, the method comprising:
(i) administering a recombinant adeno-associated virus (rAAV) to the subject, wherein the rAAV encapsidates the payload, and wherein the rAAV comprises a VP capsid polypeptide comprising a 581 to 589 region comprising at least one substitution relative to SEQ ID NO: 9, and wherein the 581 to 589 region comprises one or more basic amino acid residues; and
(ii) delivering the payload to the retina tissue.

79. A method of delivering a payload to a retina tissue of a subject, the method comprising:
(i) administering a recombinant adeno-associated virus (rAAV) to the subject, wherein the rAAV encapsidates the payload, and wherein the rAAV comprises a VP capsid polypeptide comprising a 581 to 589 region having at least 85% sequence identity to any one of SEQ ID NO: 14-SEQ ID NO: 2013 or SEQ ID NO: 2514-SEQ ID NO: 4513; and
(ii) delivering the payload to the retina tissue.

80. A method of delivering a payload to a retina tissue of a subject, the method comprising:
(i) administering a recombinant adeno-associated virus (rAAV) to the subject, wherein the rAAV encapsidates the payload, and wherein the rAAV comprises the VP capsid polypeptide of any one of claims 1-64; and
(ii) delivering the payload to the retina tissue.

81. The method of any one of claims 78-80, comprising administering the rAAV via intravitreal administration.

82. The method of any one of claims 78-80, comprising administering the rAAV via subretinal injection, topical mucosal administration, or systemic administration.

83. The method of any one of claims 75-82, further comprising expressing a therapeutic polypeptide or a therapeutic polynucleotide encoded by the payload.

84. The method of any one of claims 75-83, further comprising producing a therapeutic effect upon expression of the payload.

85. The method of claim 84, wherein the therapeutic effect is produced upon administration of from 1×10⁵ to 5×10¹⁴ rAAVs.

86. The method of claim 84 or claim 85, comprising administering an amount of the rAAV sufficient to produce the therapeutic effect without producing a toxicity in the subject.

87. A method of treating a condition in a subject, the method comprising administering a recombinant adeno-associated virus (rAAV) to the subject via intravitreal administration, wherein the rAAV encapsidates a payload, and wherein the rAAV comprises a VP capsid polypeptide comprising a 581 to 589 region comprising at least one substitution relative to SEQ ID NO: 9, and wherein the 581 to 589 region comprises one or more basic amino acid residues.

88. A method of treating a condition in a subject, the method comprising administering a recombinant adeno-associated virus (rAAV) to the subject via intravitreal administration, wherein the rAAV encapsidates a payload, and wherein the rAAV comprises a VP capsid polypeptide comprising a 581 to 589 region corresponding to residues 581 to 589 of an AAV5 VP1 polypeptide having at least 85% sequence identity to any one of SEQ ID NO: 14-SEQ ID NO: 2013 or SEQ ID NO: 2514-SEQ ID NO: 4513.

89. A method of treating a condition in a subject, the method comprising administering a recombinant adeno-associated virus (rAAV) to the subject via intravitreal administration, wherein the rAAV encapsidates a payload, and wherein the rAAV comprises the VP capsid polypeptide of any one of claims 1-64.

90. The method of any one of claims 87-89, further comprising expressing the payload in a retina tissue of the subject.

91. The method of any one of claims 87-90, further comprising producing a therapeutic effect in the subject.

92. A method of treating a condition in a subject, the method comprising:
(i) administering a recombinant adeno-associated virus (rAAV) to the subject, wherein the rAAV encapsidates a payload, and wherein the rAAV comprises a VP capsid polypeptide comprising a 581 to 589 region comprising at least one substitution relative to SEQ ID NO: 9, and wherein the 581 to 589 region comprises one or more basic amino acid residues; and
(ii) expressing the payload in a retina tissue of the subject, thereby treating the condition in the subject.

93. A method of treating a condition in a subject, the method comprising:
(i) administering a recombinant adeno-associated virus (rAAV) to the subject, wherein the rAAV encapsidates a payload, and wherein the rAAV comprises a VP capsid polypeptide comprising a 581 to 589 region corresponding to residues 581 to 589 of an AAV5 VP1 polypeptide, wherein the 581 to 589 region comprises a sequence having at least 85% sequence identity to any one of SEQ ID NO: 14-SEQ ID NO: 2013 or SEQ ID NO: 2514-SEQ ID NO: 4513; and
(ii) expressing the payload in a retina tissue of the subject, thereby treating the condition in the subject.

94. A method of treating a condition in a subject, the method comprising:
(i) administering a recombinant adeno-associated virus (rAAV) to the subject, wherein the rAAV encapsidates a payload, and wherein the rAAV comprises the VP capsid polypeptide of any one of claims 1-64; and
(ii) expressing the payload in a retina tissue of the subject, thereby treating the condition in the subject.

95. A method of treating a condition in a subject, the method comprising:
(i) administering a recombinant adeno-associated virus (rAAV) to the subject, wherein the rAAV encapsidates a payload, and wherein the rAAV comprises the VP capsid polypeptide of any one of claims 1-64;
(ii) delivering the payload to a retina tissue of the subject; and
(iii) producing a therapeutic effect in the retina tissue, thereby treating the condition.

96. The method of any one of claims 92-95, comprising administering the rAAV via intravitreal administration.

97. The method of any one of claims 92-95, comprising administering the rAAV via subretinal injection, topical mucosal administration, or systemic administration.

98. The method of any one of claims 87-97, wherein the condition is an ocular condition.

99. The method of claim 98, wherein the ocular condition is achromatopsia, macular degeneration, cataracts, choroideremia, glaucoma, optical neuropathy, Marfan syndrome, myopia, polypoidal choroidal vasculopathy, retinitis pigmentosa, Stargardt disease, Usher syndrome, Leber congenital amaurosis, Leber hereditary optical neuropathy, Uveal melanoma, or X-linked retinoschisis.

100. The method of claim 98 or claim 99, wherein the ocular condition is Stargardt disease.

101. The method of any one of claims 76-100, further comprising delivering the rAAV to a retina tissue with higher tissue tropism than a wild type AAV5 capsid comprising a peptide of SEQ ID NO: 1.

102. The method of any one of claims 76-101, further comprising delivering the rAAV to a retina tissue with higher tissue tropism than for photoreceptor tissue.

103. The method of any one of claims 76-102, comprising delivering the rAAV to a retina tissue with at least 2.5-fold, at least 3-fold, at least 3.5-fold, at least 4-fold, at least 5-fold, at least 10-fold, at least 20-fold, at least 50-fold, at least 75-fold, at least 100-fold, at least 200-fold, at least 500-fold higher, or at least 1000-fold higher tissue tropism than a wild type AAV5 capsid comprising a peptide of SEQ ID NO: 1.

104. The method of any one of claims 76-103, comprising administering from 1×10⁵ to 5×10¹⁴ rAAVs.

105. The method of any one of claims 76-104, wherein the payload encodes a therapeutic protein, therapeutic polynucleotide, a guide RNA, a tRNA, a suppressor tRNA, a siRNA, a miRNA, an mRNA, a shRNA, a circular RNA, an antisense oligonucleotide (ASO), a ribozyme, a DNAzyme, an aptamer, or any combination thereof.

106. The method of claim 105, wherein the guide RNA is a CRISPR/Cas guide RNA or an ADAR guide RNA.

107. The method of claim 105, wherein the therapeutic protein is selected from the group consisting of CNGB3, NOS2A, CFH, CF, C2, C3, CFB, HTRA1/LOC, MMP-9, TIMP-3, SLC16A8, GEMIN4, CYP51A1, RIC1, TAPT1, TAF1A, WDR87, APE1, MIP, Cx50, GJA3, GJA8, CRYAA, CRYBB2, PRX, POLR3B, XRCC1, ZNF350, EPHA2, REP1, CALM2, MPP-7, Optineurin, LOX1, CYP1B1, CAV1/2, MYOC, PITX2, FOXC1, PAX6, LTBP2, Complex I, ND, OPA1, RPE65, FBN1, TGFBR2, MTHFR, MTR, MTRR, HGF, C-MET, UMODL1, MMP-1/2, CBS, IGF-1, UHRF1BP1L, PTPRR, PPFIA2, P4HA2, SERPING1, PEDF, ARMS2-HTRA1, FGD6, ABCG1, LOC387715, CETP, NRL, RDH12, PRPH2 (RDS), RHO, RPGR, SNRNP200, NR2E3, IMPDH1, CRX, HK1, IMPDH2, PRPF3, AGBL5, ABCA1, ABCA4, CRB1, USH2A, NRP1, ND4, RLBP1, PTEN, BAP1, GNAQ, GNA11, DDEF1, SF3B1, EIF1AX, CDKN2A, p14ARF, HERC2/OCA2, VEGF, and RS1.

108. The method of claim 105, wherein the therapeutic polynucleotide targets an mRNA encoding a protein selected from the group consisting of CNGB3, NOS2A, CFH, CF, C2, C3, CFB, HTRA1/LOC, MMP-9, TIMP-3, SLC16A8, GEMIN4, CYP51A1, RIC1, TAPT1, TAF1A, WDR87, APE1, MIP, Cx50, GJA3, GJA8, CRYAA, CRYBB2, PRX, POLR3B, XRCC1, ZNF350, EPHA2, REP1, CALM2, MPP-7, Optineurin, LOX1, CYP1B1, CAV1/2, MYOC, PITX2, FOXC1, PAX6, LTBP2, Complex I, ND, OPA1, RPE65, FBN1, TGFBR2, MTHFR, MTR, MTRR, HGF, C-MET, UMODL1, MMP-1/2, CBS, IGF-1, UHRF1BP1L, PTPRR, PPFIA2, P4HA2, SERPING1, PEDF, ARMS2-HTRA1, FGD6, ABCG1, LOC387715, CETP, NRL, RDH12, PRPH2 (RDS), RHO, RPGR, SNRNP200, NR2E3, IMPDH1, CRX, HK1, IMPDH2, PRPF3, AGBL5, ABCA1, ABCA4, CRB1, USH2A, NRP1, ND4, RLBP1, PTEN, BAP1, GNAQ, GNA11, DDEF1, SF3B1, EIF1AX, CDKN2A, p14ARF, HERC2/OCA2, VEGF, or RS1.

109. The method of claim 105, wherein the payload encodes a therapeutic polynucleotide targeting ABCA1, ABCA4, or CRB1 or a transgene encoding ABCA1, ABCA4, or CRB1.

110. The method of claim 105, wherein the payload encodes a component of a CRISPR/Cas system, an adenosine deaminase acting on RNA (ADAR) enzyme, a transcriptional activator, or a transcriptional repressor.

111. The method of claim 110, wherein the component of the CRISPR/Cas system comprises a Cas3, a Cas8, a Cas10, a Cas9, a Cas4, a Cas12, a Cas13, a guide RNA, or a combination thereof.

112. The method of claim 110, wherein the ADAR enzyme is ADAR1 or ADAR2.

113. The method of claim 110, wherein the transcriptional activator is VP64.

114. The method of claim 110, wherein the transcriptional repressor is KRAB.

115. The method of any one of claims 105-114, further comprising expressing a therapeutic polypeptide or a therapeutic polynucleotide encoded by the payload.

116. The method of any one of claims 105-115, comprising expressing the therapeutic polypeptide or the therapeutic polynucleotide at a higher level in a retina tissue compared to a wild type AAV5 capsid comprising a peptide of SEQ ID NO: 1.

117. The method of claim 116, comprising expressing the therapeutic polypeptide or the therapeutic polynucleotide in a retina tissue at a level that is at least 3-fold, at least 3.5-fold, at least 4-fold, at least 5-fold, at least 10-fold, at least 20-fold, at least 50-fold, at least 75-fold, at least 100-fold, at least 200-fold, at least 500-fold higher, or at least 1000-fold higher compared to the wild type AAV5 capsid.

118. The method of any one of claims 76-117, comprising producing a toxicity in the subject that is lower than a toxicity produced upon administration of a comparable number of wild type AAV5 capsids comprising a VP capsid polypeptide of SEQ ID NO: 1.

119. The method of any one of claims 76-118, comprising producing a toxicity in the subject that is lower than a toxicity produced upon administration of a number of wild type AAV5 capsids comprising a VP capsid polypeptide of SEQ ID NO: 1 sufficient to deliver a comparable number of payloads to a retina tissue.

120. The method of any one of claims 76-119, comprising producing a concentration of neutralizing antibodies in the subject that is lower than a concentration of neutralizing antibodies produced upon administration of a comparable number of wild type AAV5 capsids comprising a VP capsid polypeptide of SEQ ID NO: 1.

121. The method of any one of claims 76-120, comprising producing a concentration of neutralizing antibodies in the subject that is lower than a concentration of neutralizing antibodies produced upon administration of a comparable number of wild type AAV2 capsids.

122. The method of any one of claims 76-121, comprising producing a concentration of neutralizing antibodies in the subject that is lower than a concentration of neutralizing antibodies produced upon administration of a comparable number of wild type AAV8 capsids.

123. The method of any one of claims 76-122, comprising producing a concentration of neutralizing antibodies in the subject that is lower than a concentration of neutralizing antibodies produced upon administration of a comparable number of wild type AAV9 capsids.

124. The method of any one of claims 76-123, comprising producing a concentration of neutralizing antibodies in the subject that is lower than a concentration of neutralizing antibodies produced upon administration of a number of wild type AAV5 capsids comprising a VP capsid polypeptide of SEQ ID NO: 1 sufficient to deliver a comparable number of payloads to a retina tissue.

125. The rAAV capsid of claim 65 or 66, the rAAV of any one of claims 67 to 73, or the pharmaceutical composition of claim 74 for use as a medicament.

126. The rAAV capsid of claim 65 or 66, the rAAV of any one of claims 67 to 73, or the pharmaceutical composition of claim 74 for use in a method of treating an ocular condition.

127. The rAAV capsid, rAAV or pharmaceutical composition for use of claim 126, wherein the ocular condition is achromatopsia, macular degeneration, cataracts, choroideremia, glaucoma, optical neuropathy, Marfan syndrome, myopia, polypoidal choroidal vasculopathy, retinitis pigmentosa, Stargardt disease, Usher syndrome, Leber congenital amaurosis, Leber hereditary optical neuropathy, Uveal melanoma, or X-linked retinoschisis.

128. The rAAV capsid, rAAV or pharmaceutical composition for use of claim 126 or 127, wherein the ocular condition is Stargardt disease.

129. A viral protein (VP) capsid polypeptide comprising a 581 to 589 region corresponding to residues 581 to 589 of an AAV5 VP1 polypeptide, wherein the 581 to 589 region comprises a sequence having at least 85% sequence identity to any one of SEQ ID NO: 2014-SEQ ID NO: 2513.

130. The VP capsid polypeptide of claim 1, wherein the 581 to 589 region comprises a sequence of any one of SEQ ID NO: 2014-SEQ ID NO: 2513.

131. A viral protein (VP) capsid polypeptide comprising a 581 to 589 region corresponding to residues 581 to 589 of an AAV5 VP1 polypeptide, wherein the 581 to 589 region comprises a sequence having at least 85% sequence identity to any one of SEQ ID NO: 4514-SEQ ID NO: 5013.

132. The VP capsid polypeptide of claim 3, wherein the 581 to 589 region comprises a sequence of any one of SEQ ID NO: 4514-SEQ ID NO: 5013.

133. A recombinant viral adeno-associated virus (rAAV) capsid comprising the VP capsid polypeptide of any one of claims 129-132, wherein the rAAV capsid preferentially targets retinal pigment epithelium tissue.

134. A recombinant viral adeno-associated virus (rAAV) capsid comprising the VP capsid polypeptide of any one of claims 129-132, wherein the rAAV capsid preferentially targets choroid tissue.

135. A method of delivering a payload to a retinal pigment epithelium tissue of a subject, the method comprising administering a recombinant adeno-associated virus (rAAV) to the subject via intravitreal administration, wherein the rAAV encapsidates the payload, and wherein the rAAV comprises a VP capsid polypeptide comprising a 581 to 589 region corresponding to residues 581 to 589 of an AAV5 VP1 polypeptide having at least 85% sequence identity to any one of SEQ ID NO: 2014-SEQ ID NO: 2513 or SEQ ID NO: 4514-SEQ ID NO: 5013.

136. A method of delivering a payload to a retinal pigment epithelium tissue of a subject, the method comprising administering a recombinant adeno-associated virus (rAAV) to the subject via intravitreal administration, wherein the rAAV encapsidates the payload, and wherein the rAAV comprises a VP capsid polypeptide comprising a 581 to 589 region corresponding to residues 581 to 589 of an AAV5 VP1 polypeptide having at least 85% sequence identity to any one of SEQ ID NO: 2014-SEQ ID NO: 2513 or SEQ ID NO: 4514-SEQ ID NO: 5013.

137. A method of delivering a payload to a choroid tissue of a subject, the method comprising:
(i) administering a recombinant adeno-associated virus (rAAV) to the subject, wherein the rAAV encapsidates the payload, and wherein the rAAV comprises a VP capsid polypeptide comprising a 581 to 589 region having at least 85% sequence identity to any one of SEQ ID NO: 2014-SEQ ID NO: 2513 or SEQ ID NO: 4514-SEQ ID NO: 5013; and
(ii) delivering the payload to the choroid tissue.

138. A method of delivering a payload to a retinal pigment epithelium tissue of a subject, the method comprising:
(i) administering a recombinant adeno-associated virus (rAAV) to the subject, wherein the rAAV encapsidates the payload, and wherein the rAAV comprises a VP capsid polypeptide comprising a 581 to 589 region having at least 85% sequence identity to any one of SEQ ID NO: 2014-SEQ ID NO: 2513 or SEQ ID NO: 4514-SEQ ID NO: 5013; and
(ii) delivering the payload to the retinal pigment epithelium tissue.

139. A method of treating a condition in a subject, the method comprising administering a recombinant adeno-associated virus (rAAV) to the subject via intravitreal administration, wherein the rAAV encapsidates a payload, and wherein the rAAV comprises a VP capsid polypeptide comprising a 581 to 589 region corresponding to residues 581 to 589 of an AAV5 VP1 polypeptide having at least 85% sequence identity to any one of SEQ ID NO: 2014-SEQ ID NO: 2513 or SEQ ID NO: 4514-SEQ ID NO: 5013.

140. A method of treating a condition in a subject, the method comprising:
(i) administering a recombinant adeno-associated virus (rAAV) to the subject, wherein the rAAV encapsidates a payload, and wherein the rAAV comprises a VP capsid polypeptide comprising a 581 to 589 region corresponding to residues 581 to 589 of an AAV5 VP1 polypeptide, wherein the 581 to 589 region comprises a sequence having at least 85% sequence identity to any one of SEQ ID NO: 2014-SEQ ID NO: 2513 or SEQ ID NO: 4514-SEQ ID NO: 5013; and
(ii) expressing the payload in a retinal pigment epithelium tissue of the subject, thereby treating the condition in the subject.

The application's sequence listing, which the Patent Office published only in electronic form, follows.

SEQUENCE LISTING (5013 sequences)

SEQ ID NO: 1 - protein, 724 aa, Adeno-associated virus 5
MSFVDHPPDWLEEVGEGLREFLGLEAGPPKPKPNQQHQDQARGLVLPGYNYLGPGNGLDRGEPVNRADEVAREHDISYNEQLEAGDNPYLKYNHADAEFQEKLADDTSFGGNLGKAVFQAKKRVLEPFGLVEEGAKTAPTGKRIDDHFPKRKKARTEEDSKPSTSSDAEAGPSGSQQLQIPAQPASSLGADTMSAGGGGPLGDNNQGADGVGNASGDWHCDSTWMGDRVVTKSTRTWVLPSYNNHQYREIKSGSVDGSNANAYFGYSTPWGYFDFNRFHSHWSPRDWQRLINNYWGFRPRSLRVKIFNIQVKEVTVQDSTTTIANNLTSTVQVFTDDDYQLPYVVGNGTEGCLPAFPPQVFTLPQYGYATLNRDNTENPTERSSFFCLEYFPSKMLRTGNNFEFTYNFEEVPFHSSFAPSQNLFKLANPLVDQYLYRFVSTNNTGGVQFNKNLAGRYANTYKNWFPGPMGRTQGWNLGSGVNRASVSAFATTNRMELEGASYQVPPQPNGMTNNLQGSNTYALENTMIFNSQPANPGTTATYLEGNMLITSESETQPVNRVAYNVGGQMATNNQSSTTAPATGTYNLQEIVPGSVWMERDVYLQGPIWAKIPETGAHFHPSPAMGGFGLKHPPPMMLIKNTPVPGNITSFSDVPVSSFITQYSTGQVTVEMEWELKKENSKRWNPEIQYTNNYNDPQFVDFAPDSTGEYRTTRPIGTRYLTRPL

SEQ ID NO: 2 - protein, 724 aa, synthetic construct
  VARIANT 581: note = A, R, N, D, C, E, Q, G, H, I, L, K, M, F, P, S, T, W, Y, or V
  VARIANT 582: note = A, R, N, D, C, E, Q, G, H, I, L, K, M, F, P, S, T, W, Y, or V
  VARIANT 583: note = A, R, N, D, C, E, Q, G, H, I, L, K, M, F, P, S, T, W, Y, or V
  VARIANT 584: note = A, R, N, D, C, E, Q, G, H, I, L, K, M, F, P, S, T, W, Y, or V
  VARIANT 585: note = A, R, N, D, C, E, Q, G, H, I, L, K, M, F, P, S, T, W, Y, or V
  VARIANT 586: note = A, R, N, D, C, E, Q, G, H, I, L, K, M, F, P, S, T, W, Y, or V
  VARIANT 587: note = A, R, N, D, C, E, Q, G, H, I, L, K, M, F, P, S, T, W, Y, or V
  VARIANT 588: note = A, R, N, D, C, E, Q, G, H, I, L, K, M, F, P, S, T, W, Y, or V
  VARIANT 589: note = A, R, N, D, C, E, Q, G, H, I, L, K, M, F, P, S, T, W, Y, or V
MSFVDHPPDWLEEVGEGLREFLGLEAGPPKPKPNQQHQDQARGLVLPGYNYLGPGNGLDRGEPVNRADEVAREHDISYNEQLEAGDNPYLKYNHADAEFQEKLADDTSFGGNLGKAVFQAKKRVLEPFGLVEEGAKTAPTGKRIDDHFPKRKKARTEEDSKPSTSSDAEAGPSGSQQLQIPAQPASSLGADTMSAGGGGPLGDNNQGADGVGNASGDWHCDSTWMGDRVVTKSTRTWVLPSYNNHQYREIKSGSVDGSNANAYFGYSTPWGYFDFNRFHSHWSPRDWQRLINNYWGFRPRSLRVKIFNIQVKEVTVQDSTTTIANNLTSTVQVFTDDDYQLPYVVGNGTEGCLPAFPPQVFTLPQYGYATLNRDNTENPTERSSFFCLEYFPSKMLRTGNNFEFTYNFEEVPFHSSFAPSQNLFKLANPLVDQYLYRFVSTNNTGGVQFNKNLAGRYANTYKNWFPGPMGRTQGWNLGSGVNRASVSAFATTNRMELEGASYQVPPQPNGMTNNLQGSNTYALENTMIFNSQPANPGTTATYLEGNMLITSESETQPVNRVAYNVGGQMATNNQSSTTAPXXXXXXXXXIVPGSVWMERDVYLQGPIWAKIPETGAHFHPSPAMGGFGLKHPPPMMLIKNTPVPGNITSFSDVPVSSFITQYSTGQVTVEMEWELKKENSKRWNPEIQYTNNYNDPQFVDFAPDSTGEYRTTRPIGTRYLTRPL

SEQ ID NO: 3 - protein, 724 aa, synthetic construct
MSFVDHPPDWLEEVGEGLREFLGLEAGPPKPKPNQQHQDQARGLVLPGYNYLGPGNGLDRGEPVNRADEVAREHDISYNEQLEAGDNPYLKYNHADAEFQEKLADDTSFGGNLGKAVFQAKKRVLEPFGLVEEGAKTAPTGKRIDDHFPKRKKARTEEDSKPSTSSDAEAGPSGSQQLQIPAQPASSLGADTMSAGGGGPLGDNNQGADGVGNASGDWHCDSTWMGDRVVTKSTRTWVLPSYNNHQYREIKSGSVDGSNANAYFGYSTPWGYFDFNRFHSHWSPRDWQRLINNYWGFRPRSLRVKIFNIQVKEVTVQDSTTTIANNLTSTVQVFTDDDYQLPYVVGNGTEGCLPAFPPQVFTLPQYGYATLNRDNTENPTERSSFFCLEYFPSKMLRTGNNFEFTYNFEEVPFHSSFAPSQNLFKLANPLVDQYLYRFVSTNNTGGVQFNKNLAGRYANTYKNWFPGPMGRTQGWNLGSGVNRASVSAFATTNRMELEGASYQVPPQPNGMTNNLQGSNTYALENTMIFNSQPANPGTTATYLEGNMLITSESETQPVNRVAYNVGGQMATNNQSSTTAPATGTVNLQEIVPGSVWMERDVYLQGPIWAKIPETGAHFHPSPAMGGFGLKHPPPMMLIKNTPVPGNITSFSDVPVSSFITQYSTGQVTVEMEWELKKENSKRWNPEIQYTNNYNDPQFVDFAPDSTGEYRTTRPIGTRYLTRPL

SEQ ID NO: 4 - protein, 724 aa, synthetic construct
MSFVDHPPDWLEEVGEGLREFLGLEAGPPKPKPNQQHQDQARGLVLPGYNYLGPGNGLDRGEPVNRADEVAREHDISYNEQLEAGDNPYLKYNHADAEFQEKLADDTSFGGNLGKAVFQAKKRVLEPFGLVEEGAKTAPTGKRIDDHFPKRKKARTEEDSKPSTSSDAEAGPSGSQQLQIPAQPASSLGADTMSAGGGGPLGDNNQGADGVGNASGDWHCDSTWMGDRVVTKSTRTWVLPSYNNHQYREIKSGSVDGSNANAYFGYSTPWGYFDFNRFHSHWSPRDWQRLINNYWGFRPRSLRVKIFNIQVKEVTVQDSTTTIANNLTSTVQVFTDDDYQLPYVVGNGTEGCLPAFPPQVFTLPQYGYATLNRDNTENPTERSSFFCLEYFPSKMLRTGNNFEFTYNFEEVPFHSSFAPSQNLFKLANPLVDQYLYRFVSTNNTGGVQFNKNLAGRYANTYKNWFPGPMGRTQGWNLGSGVNRASVSAFATTNRMELEGASYQVPPQPNGMTNNLQGSNTYALENTMIFNSQPANPGTTATYLEGNMLITSESETQPVNRVAYNVGGQMATNNQSSTTAPATGTYNTQEIVPGSVWMERDVYLQGPIWAKIPETGAHFHPSPAMGGFGLKHPPPMMLIKNTPVPGNITSFSDVPVSSFITQYSTGQVTVEMEWELKKENSKRWNPEIQYTNNYNDPQFVDFAPDSTGEYRTTRPIGTRYLTRPL

SEQ ID NO: 5 - protein, 724 aa, synthetic construct
MSFVDHPPDWLEEVGEGLREFLGLEAGPPKPKPNQQHQDQARGLVLPGYNYLGPGNGLDRGEPVNRADEVAREHDISYNEQLEAGDNPYLKYNHADAEFQEKLADDTSFGGNLGKAVFQAKKRVLEPFGLVEEGAKTAPTGKRIDDHFPKRKKARTEEDSKPSTSSDAEAGPSGSQQLQIPAQPASSLGADTMSAGGGGPLGDNNQGADGVGNASGDWHCDSTWMGDRVVTKSTRTWVLPSYNNHQYREIKSGSVDGSNANAYFGYSTPWGYFDFNRFHSHWSPRDWQRLINNYWGFRPRSLRVKIFNIQVKEVTVQDSTTTIANNLTSTVQVFTDDDYQLPYVVGNGTEGCLPAFPPQVFTLPQYGYATLNRDNTENPTERSSFFCLEYFPSKMLRTGNNFEFTYNFEEVPFHSSFAPSQNLFKLANPLVDQYLYRFVSTNNTGGVQFNKNLAGRYANTYKNWFPGPMGRTQGWNLGSGVNRASVSAFATTNRMELEGASYQVPPQPNGMTNNLQGSNTYALENTMIFNSQPANPGTTATYLEGNMLITSESETQPVNRVAYNVGGQMATNNQSSTTAPTTGTYNLQEIVPGSVWMERDVYLQGPIWAKIPETGAHFHPSPAMGGFGLKHPPPMMLIKNTPVPGNITSFSDVPVSSFITQYSTGQVTVEMEWELKKENSKRWNPEIQYTNNYNDPQFVDFAPDSTGEYRTTRPIGTRYLTRPL

SEQ ID NO: 6 - protein, 724 aa, synthetic construct
MSFVDHPPDWLEEVGEGLREFLGLEAGPPKPKPNQQHQDQARGLVLPGYNYLGPGNGLDRGEPVNRADEVAREHDISYNEQLEAGDNPYLKYNHADAEFQEKLADDTSFGGNLGKAVFQAKKRVLEPFGLVEEGAKTAPTGKRIDDHFPKRKKARTEEDSKPSTSSDAEAGPSGSQQLQIPAQPASSLGADTMSAGGGGPLGDNNQGADGVGNASGDWHCDSTWMGDRVVTKSTRTWVLPSYNNHQYREIKSGSVDGSNANAYFGYSTPWGYFDFNRFHSHWSPRDWQRLINNYWGFRPRSLRVKIFNIQVKEVTVQDSTTTIANNLTSTVQVFTDDDYQLPYVVGNGTEGCLPAFPPQVFTLPQYGYATLNRDNTENPTERSSFFCLEYFPSKMLRTGNNFEFTYNFEEVPFHSSFAPSQNLFKLANPLVDQYLYRFVSTNNTGGVQFNKNLAGRYANTYKNWFPGPMGRTQGWNLGSGVNRASVSAFATTNRMELEGASYQVPPQPNGMTNNLQGSNTYALENTMIFNSQPANPGTTATYLEGNMLITSESETQPVNRVAYNVGGQMATNNQSSTTAPAAGTYNLQEIVPGSVWMERDVYLQGPIWAKIPETGAHFHPSPAMGGFGLKHPPPMMLIKNTPVPGNITSFSDVPVSSFITQYSTGQVTVEMEWELKKENSKRWNPEIQYTNNYNDPQFVDFAPDSTGEYRTTRPIGTRYLTRPL

SEQ ID NO: 7 - protein, 724 aa, synthetic construct
MSFVDHPPDWLEEVGEGLREFLGLEAGPPKPKPNQQHQDQARGLVLPGYNYLGPGNGLDRGEPVNRADEVAREHDISYNEQLEAGDNPYLKYNHADAEFQEKLADDTSFGGNLGKAVFQAKKRVLEPFGLVEEGAKTAPTGKRIDDHFPKRKKARTEEDSKPSTSSDAEAGPSGSQQLQIPAQPASSLGADTMSAGGGGPLGDNNQGADGVGNASGDWHCDSTWMGDRVVTKSTRTWVLPSYNNHQYREIKSGSVDGSNANAYFGYSTPWGYFDFNRFHSHWSPRDWQRLINNYWGFRPRSLRVKIFNIQVKEVTVQDSTTTIANNLTSTVQVFTDDDYQLPYVVGNGTEGCLPAFPPQVFTLPQYGYATLNRDNTENPTERSSFFCLEYFPSKMLRTGNNFEFTYNFEEVPFHSSFAPSQNLFKLANPLVDQYLYRFVSTNNTGGVQFNKNLAGRYANTYKNWFPGPMGRTQGWNLGSGVNRASVSAFATTNRMELEGASYQVPPQPNGMTNNLQGSNTYALENTMIFNSQPANPGTTATYLEGNMLITSESETQPVNRVAYNVGGQMATNNQSSTTAPATGAYNLQEIVPGSVWMERDVYLQGPIWAKIPETGAHFHPSPAMGGFGLKHPPPMMLIKNTPVPGNITSFSDVPVSSFITQYSTGQVTVEMEWELKKENSKRWNPEIQYTNNYNDPQFVDFAPDSTGEYRTTRPIGTRYLTRPL

SEQ ID NO: 8 - protein, 724 aa, synthetic construct
MSFVDHPPDWLEEVGEGLREFLGLEAGPPKPKPNQQHQDQARGLVLPGYNYLGPGNGLDRGEPVNRADEVAREHDISYNEQLEAGDNPYLKYNHADAEFQEKLADDTSFGGNLGKAVFQAKKRVLEPFGLVEEGAKTAPTGKRIDDHFPKRKKARTEEDSKPSTSSDAEAGPSGSQQLQIPAQPASSLGADTMSAGGGGPLGDNNQGADGVGNASGDWHCDSTWMGDRVVTKSTRTWVLPSYNNHQYREIKSGSVDGSNANAYFGYSTPWGYFDFNRFHSHWSPRDWQRLINNYWGFRPRSLRVKIFNIQVKEVTVQDSTTTIANNLTSTVQVFTDDDYQLPYVVGNGTEGCLPAFPPQVFTLPQYGYATLNRDNTENPTERSSFFCLEYFPSKMLRTGNNFEFTYNFEEVPFHSSFAPSQNLFKLANPLVDQYLYRFVSTNNTGGVQFNKNLAGRYANTYKNWFPGPMGRTQGWNLGSGVNRASVSAFATTNRMELEGASYQVPPQPNGMTNNLQGSNTYALENTMIFNSQPANPGTTATYLEGNMLITSESETQPVNRVAYNVGGQMATNNQSSTTAPATGTVNTQEIVPGSVWMERDVYLQGPIWAKIPETGAHFHPSPAMGGFGLKHPPPMMLIKNTPVPGNITSFSDVPVSSFITQYSTGQVTVEMEWELKKENSKRWNPEIQYTNNYNDPQFVDFAPDSTGEYRTTRPIGTRYLTRPL

SEQ ID NO: 9 - protein, 9 aa, Adeno-associated virus 5
ATGTYNLQE

SEQ ID NO: 10 - protein, 588 aa, Adeno-associated virus 5
TAPTGKRIDDHFPKRKKARTEEDSKPSTSSDAEAGPSGSQQLQIPAQPASSLGADTMSAGGGGPLGDNNQGADGVGNASGDWHCDSTWMGDRVVTKSTRTWVLPSYNNHQYREIKSGSVDGSNANAYFGYSTPWGYFDFNRFHSHWSPRDWQRLINNYWGFRPRSLRVKIFNIQVKEVTVQDSTTTIANNLTSTVQVFTDDDYQLPYVVGNGTEGCLPAFPPQVFTLPQYGYATLNRDNTENPTERSSFFCLEYFPSKMLRTGNNFEFTYNFEEVPFHSSFAPSQNLFKLANPLVDQYLYRFVSTNNTGGVQFNKNLAGRYANTYKNWFPGPMGRTQGWNLGSGVNRASVSAFATTNRMELEGASYQVPPQPNGMTNNLQGSNTYALENTMIFNSQPANPGTTATYLEGNMLITSESETQPVNRVAYNVGGQMATNNQSSTTAPATGTYNLQEIVPGSVWMERDVYLQGPIWAKIPETGAHFHPSPAMGGFGLKHPPPMMLIKNTPVPGNITSFSDVPVSSFITQYSTGQVTVEMEWELKKENSKRWNPEIQYTNNYNDPQFVDFAPDSTGEYRTTRPIGTRYLTRPL

SEQ ID NO: 11 - protein, 532 aa, Adeno-associated virus 5
MSAGGGGPLGDNNQGADGVGNASGDWHCDSTWMGDRVVTKSTRTWVLPSYNNHQYREIKSGSVDGSNANAYFGYSTPWGYFDFNRFHSHWSPRDWQRLINNYWGFRPRSLRVKIFNIQVKEVTVQDSTTTIANNLTSTVQVFTDDDYQLPYVVGNGTEGCLPAFPPQVFTLPQYGYATLNRDNTENPTERSSFFCLEYFPSKMLRTGNNFEFTYNFEEVPFHSSFAPSQNLFKLANPLVDQYLYRFVSTNNTGGVQFNKNLAGRYANTYKNWFPGPMGRTQGWNLGSGVNRASVSAFATTNRMELEGASYQVPPQPNGMTNNLQGSNTYALENTMIFNSQPANPGTTATYLEGNMLITSESETQPVNRVAYNVGGQMATNNQSSTTAPATGTYNLQEIVPGSVWMERDVYLQGPIWAKIPETGAHFHPSPAMGGFGLKHPPPMMLIKNTPVPGNITSFSDVPVSSFITQYSTGQVTVEMEWELKKENSKRWNPEIQYTNNYNDPQFVDFAPDSTGEYRTTRPIGTRYLTRPL

SEQ ID NO: 12 - protein, 20 aa, synthetic construct
VAYNVGGQMATNNQSSTTAP

SEQ ID NO: 13 - protein, 20 aa, synthetic construct
IVPGSVWMERDVYLQGPIWA

SEQ ID NO: 14 - protein, 9 aa, synthetic construct
AALHSRMYQ

SEQ ID NO: 15 - protein, 9 aa, synthetic construct
AAMRWQRES

SEQ ID NO: 16 - protein, 9 aa, synthetic construct
AAVLKYWQQ

SEQ ID NO: 17 - protein, 9 aa, synthetic construct
ACCQKRRSQ

SEQ ID NO: 18 - protein, 9 aa, synthetic construct
ACKGKQKWA

SEQ ID NO: 19 - protein, 9 aa, synthetic construct
ACVSLRQGC

SEQ ID NO: 20 - protein, 9 aa, synthetic construct
ADCPLYCQP

SEQ ID NO: 21 - protein, 9 aa, synthetic construct
AEKGCRKYG

SEQ ID NO: 22 - protein, 9 aa, synthetic construct
AFISTRRAG

SEQ ID NO: 23 - protein, 9 aa, synthetic construct
AFKFKSDWG

SEQ ID NO: 24 - protein, 9 aa, synthetic construct
AFLTIRRHY

SEQ ID NO: 25 - protein, 9 aa, synthetic construct
AFMRPQQFP

SEQ ID NO: 26 - protein, 9 aa, synthetic construct
AFVDNLMDP

SEQ ID NO: 27 - protein, 9 aa, synthetic construct
AGALARKMM

SEQ ID NO: 28 - protein, 9 aa, synthetic construct
AGVSKRTGS

SEQ ID NO: 29 - protein, 9 aa, synthetic construct
AHKYSRTMQ

SEQ ID NO: 30 - protein, 9 aa, synthetic construct
AHVKPVQTM

SEQ ID NO: 31 - protein, 9 aa, synthetic construct
AHWPKQYDP

SEQ ID NO: 32 - protein, 9 aa, synthetic construct
AICRKDRHQ

SEQ ID NO: 33 - protein, 9 aa, synthetic construct
AIKATRFRN

SEQ ID NO: 34 - protein, 9 aa, synthetic construct
AIKCREQMR

SEQ ID NO: 35 - protein, 9 aa, synthetic construct
AIKELRLWP

SEQ ID NO: 36 - protein, 9 aa, synthetic construct
AIKMSRRYE

SEQ ID NO: 37 - protein, 9 aa, synthetic construct
AIKTRGCSY

SEQ ID NO: 38 - protein, 9 aa, synthetic construct
AIRLAGPIG

SEQ ID NO: 39 - protein, 9 aa, synthetic construct
AIYHDLRAM

SEQ ID NO: 40 - protein, 9 aa, synthetic construct
ALKITRLME

SEQ ID NO: 41 - protein, 9 aa, synthetic construct
ALKNVPLYG

SEQ ID NO: 42 - protein, 9 aa, synthetic construct
ALKSRGKGD

SEQ ID NO: 43 - protein, 9 aa, synthetic construct
ALKTTSKWP

SEQ ID NO: 44 - protein, 9 aa, synthetic construct
AMCAKKKWC

SEQ ID NO: 45 - protein, 9 aa, synthetic construct
AMKLHKSAG

SEQ ID NO: 46 - protein, 9 aa, synthetic construct
AMKQKQAYQ

SEQ ID NO: 47 - protein, 9 aa, synthetic construct
ANIQYRHGM

SEQ ID NO: 48 - protein, 9 aa, synthetic construct
ANKASKRAC

SEQ ID NO: 49 - protein, 9 aa, synthetic construct
APKPATKHP

SEQ ID NO: 50 - protein, 9 aa, synthetic construct
AQYPMHRHQ

SEQ ID NO: 51 - protein, 9 aa, synthetic construct
ARSRLKNQT

SEQ ID NO: 52 - protein, 9 aa, synthetic construct
ASHGMGRQA

SEQ ID NO: 53 - protein, 9 aa, synthetic construct
ASRQKYKCV

SEQ ID NO: 54 - protein, 9 aa, synthetic construct
ATHMLGRHG

SEQ ID NO: 55 - protein, 9 aa, synthetic construct
ATKQKTCLG

SEQ ID NO: 56 - protein, 9 aa, synthetic construct
ATRGCCHSW

SEQ ID NO: 57 - protein, 9 aa, synthetic construct
ATWKEELSE

SEQ ID NO: 58 - protein, 9 aa, synthetic construct
AVAGWLRAE

SEQ ID NO: 59 - protein, 9 aa, synthetic construct
AVGQSKHVP

SEQ ID NO: 60 - protein, 9 aa, synthetic construct
AVHFKKCHL

SEQ ID NO: 61 - protein, 9 aa, synthetic construct
AVKMKSTPP

SEQ ID NO: 62 - protein, 9 aa, synthetic construct
AVRTSRHCF

SEQ ID NO: 63 - protein, 9 aa, synthetic construct
AWKLKKSYM

SEQ ID NO: 64 - protein, 9 aa, synthetic construct
AYKQKQKYN

SEQ ID NO: 65 - protein, 9 aa, synthetic construct
CAKPKVAIC

SEQ ID NO: 66 - protein, 9 aa, synthetic construct
CAKVHRNWD

SEQ ID NO: 67 - protein, 9 aa, synthetic construct
CARFERHMY

SEQ ID NO: 68 - protein, 9 aa, synthetic construct
CCKCRKYMS

SEQ ID NO: 69 - protein, 9 aa, synthetic construct
CCQPKPWKW

SEQ ID NO: 70 - protein, 9 aa, synthetic construct
CDYKRVKKY

SEQ ID NO: 71 - protein, 9 aa, synthetic construct
CEMFWARVI

SEQ ID NO: 72 - protein, 9 aa, synthetic construct
CFGTIRRGC

SEQ ID NO: 73 - protein, 9 aa, synthetic construct
CFILLKARS

SEQ ID NO: 74 - protein, 9 aa, synthetic construct
CFKEYRHHS

SEQ ID NO: 75 - protein, 9 aa, synthetic construct
CIHPKSKYL

SEQ ID NO: 76 - protein, 9 aa, synthetic construct
CIKQKKSSN

SEQ ID NO: 77 - protein, 9 aa, synthetic construct
CIRSLFHAG

SEQ ID NO: 78 - protein, 9 aa, synthetic construct
CKHTCNQCI

SEQ ID NO: 79 - protein, 9 aa, synthetic construct
CKKHQGYMP

SEQ ID NO: 80 - protein, 9 aa, synthetic construct
CKMPISKTD

SEQ ID NO: 81 - protein, 9 aa, synthetic construct
CLNCKERRT

SEQ ID NO: 82 - protein, 9 aa, synthetic construct
CMKIRQAMR

SEQ ID NO: 83 - protein, 9 aa, synthetic construct
CMKTKGHMP

SEQ ID NO: 84 - protein, 9 aa, synthetic construct
CMQRKCRMV

SEQ ID NO: 85 - protein, 9 aa, synthetic construct
CQGAIRRHC

SEQ ID NO: 86 - protein, 9 aa, synthetic construct
CQYHPRKWP

SEQ ID NO: 87 - protein, 9 aa, synthetic construct
CRCKRTREQ

SEQ ID NO: 88 - protein, 9 aa, synthetic construct
CSHGYSRVG

SEQ ID NO: 89 - protein, 9 aa, synthetic construct
CSKMIRSLE

SEQ ID NO: 90 - protein, 9 aa, synthetic construct
CSKTKNNVR

SEQ ID NO: 91 - protein, 9 aa, synthetic construct
CSKVANVMH

SEQ ID NO: 92 - protein, 9 aa, synthetic construct
CSRLRRWQF

SEQ ID NO: 93 - protein, 9 aa, synthetic construct
CTFLYDEQY

SEQ ID NO: 94 - protein, 9 aa, synthetic construct
CTKQKKRGN

SEQ ID NO: 95 - protein, 9 aa, synthetic construct
CTRDGRKWG

SEQ ID NO: 96 - protein, 9 aa, synthetic construct
CVLTSRMGS

SEQ ID NO: 97 - protein, 9 aa, synthetic construct
CVRNVKNCM

SEQ ID NO: 98 - protein, 9 aa, synthetic construct
DAFKYKRNA

SEQ ID NO: 99 - protein, 9 aa, synthetic construct
DAHSYRTHF

SEQ ID NO: 100 - protein, 9 aa, synthetic construct
DAKCRWKYC

SEQ ID NO: 101 - protein, 9 aa, synthetic construct
DAKKLHKIE

SEQ ID NO: 102 - protein, 9 aa, synthetic construct
DALVYRRNQ

SEQ ID NO: 103 - protein, 9 aa, synthetic construct
DARINRTCY

SEQ ID NO: 104 - protein, 9 aa, synthetic construct
DARQKKCYQ

SEQ ID NO: 105 - protein, 9 aa, synthetic construct
DARQLRQYH

SEQ ID NO: 106 - protein, 9 aa, synthetic construct
DARWRSITG

SEQ ID NO: 107 - protein, 9 aa, synthetic construct
DAVRARYMQ

SEQ ID NO: 108 - protein, 9 aa, synthetic construct
DCRQVRKVA

SEQ ID NO: 109 - protein, 9 aa, synthetic construct
DFDGTFDFV

SEQ ID NO: 110 - protein, 9 aa, synthetic construct
DFKSRHKTC

SEQ ID NO: 111 - protein, 9 aa, synthetic construct
DFNRFRYHG

SEQ ID NO: 112 - protein, 9 aa, synthetic construct
DGNKARVKN

SEQ ID NO: 113 - protein, 9 aa, synthetic construct
DGRKYMRGC

SEQ ID NO: 114 - protein, 9 aa, synthetic construct
DIARQRKFQ

SEQ ID NO: 115 - protein, 9 aa, synthetic construct
DIIRMRRTT

SEQ ID NO: 116 - protein, 9 aa, synthetic construct
DIKLKKKCD

SEQ ID NO: 117 - protein, 9 aa, synthetic construct
DIKNIRSHH

SEQ ID NO: 118 - protein, 9 aa, synthetic construct
DIRTSRVHV

SEQ ID NO: 119 - protein, 9 aa, synthetic construct
DITKAKRAH

SEQ ID NO: 120 - protein, 9 aa, synthetic construct
DKAKRGHSS

SEQ ID NO: 121 - protein, 9 aa, synthetic construct
DKKDKKGWY

SEQ ID NO: 122 - protein, 9 aa, synthetic construct
DKKRSQWSC

SEQ ID NO: 123 - protein, 9 aa, synthetic construct
DKVRRERCH

SEQ ID NO: 124 - protein, 9 aa, synthetic construct
DMKKRHGSC

SEQ ID NO: 125 - protein, 9 aa, synthetic construct
DMRKAGQTY

SEQ ID NO: 126 - protein, 9 aa, synthetic construct
DMSRQRAQF

SEQ ID NO: 127 - protein, 9 aa, synthetic construct
DPKKKGTWS

SEQ ID NO: 128 - protein, 9 aa, synthetic construct
DQAKFRRSY

SEQ ID NO: 129 - protein, 9 aa, synthetic construct
DQYRMRQQQ

SEQ ID NO: 130 - protein, 9 aa, synthetic construct
DRCKKQSGA

SEQ ID NO: 131 - protein, 9 aa, synthetic construct
DRIGFKKQQ

SEQ ID NO: 132 - protein, 9 aa, synthetic construct
DRKLKANWY

SEQ ID NO: 133 - protein, 9 aa, synthetic construct
DSKYGRKGL

SEQ ID NO: 134 - protein, 9 aa, synthetic construct
DSNKRTRYS

SEQ ID NO: 135 - protein, 9 aa, synthetic construct
DSRHSRVME

SEQ ID NO: 136 - protein, 9 aa, synthetic construct
DSRIMRSAE

SEQ ID NO: 137 - protein, 9 aa, synthetic construct
DSRIVRTSS

SEQ ID NO: 138 - protein, 9 aa, synthetic construct
DSRLIRCFH

SEQ ID NO: 139 - protein, 9 aa, synthetic construct
DSSRKGQMN

SEQ ID NO: 140 - protein, 9 aa, synthetic construct
DTKAWRNPS

SEQ ID NO: 141 - protein, 9 aa, synthetic construct
DTKSRKEMD

SEQ ID NO: 142 - protein, 9 aa, synthetic construct
DTKVKRHVA

SEQ ID NO: 143 - protein, 9 aa, synthetic construct
DTKWSRMRA

SEQ ID NO: 144 - protein, 9 aa, synthetic construct
DTRRCVHRS

SEQ ID NO: 145 - protein, 9 aa, synthetic construct
DTRSKGRFT

SEQ ID NO: 146 - protein, 9 aa, synthetic construct
DVKNRSMAW

SEQ ID NO: 147 - protein, 9 aa, synthetic construct
DVKPSRGGY

SEQ ID NO: 148 - protein, 9 aa, synthetic construct
DVKQRRAPH

SEQ ID NO: 149 - protein, 9 aa, synthetic construct
DVKTRRIFS

SEQ ID NO: 150 - protein, 9 aa, synthetic construct
DVNRKREYS

SEQ ID NO: 151 - protein, 9 aa, synthetic construct
DVRAVRFWP

SEQ ID NO: 152 - protein, 9 aa, synthetic construct
DVRRMAKAA

SEQ ID NO: 153 - protein, 9 aa, synthetic construct
DVRSKALMC

SEQ ID NO: 154 - protein, 9 aa, synthetic construct
DVRTERRIS

SEQ ID NO: 155 - protein, 9 aa, synthetic construct
DVRTNRIEH

SEQ ID NO: 156 - protein, 9 aa, synthetic construct
DVTSRKWLN

SEQ ID NO: 157 - protein, 9 aa, synthetic construct
DWKPKRCMP

SEQ ID NO: 158 - protein, 9 aa, synthetic construct
DYQPPRKSA

SEQ ID NO: 159 - protein, 9 aa, synthetic construct
DYRQNDVAE

SEQ ID NO: 160 - protein, 9 aa, synthetic construct
DYRRSLKAM

SEQ ID NO: 161 - protein, 9 aa, synthetic construct
DYTRFRSHQ

SEQ ID NO: 162 - protein, 9 aa, synthetic construct
EAGKGRKYW

SEQ ID NO: 163 - protein, 9 aa, synthetic construct
EAKAKQMPG

SEQ ID NO: 164 - protein, 9 aa, synthetic construct
EAKGRVIGP

SEQ ID NO: 165 - protein, 9 aa, synthetic construct
EAKGTRCPF

SEQ ID NO: 166 - protein, 9 aa, synthetic construct
EAKIRNFTM

SEQ ID NO: 167 - protein, 9 aa, synthetic construct
EAKMFVRHH

SEQ ID NO: 168 - protein, 9 aa, synthetic construct
EAKNIRCKA

SEQ ID NO: 169 - protein, 9 aa, synthetic construct
EAKTKRFCR

SEQ ID NO: 170 - protein, 9 aa, synthetic construct
EAKVQRGYN

SEQ ID NO: 171 - protein, 9 aa, synthetic construct
EAKWSGRKN

SEQ ID NO: 172 - protein, 9 aa, synthetic construct
EAMWWRHGG

SEQ ID NO: 173 - protein, 9 aa, synthetic construct
EARLTRCCL

SEQ ID NO: 174 - protein, 9 aa, synthetic construct
EARSCRCGL

SEQ ID NO: 175 - protein, 9 aa, synthetic construct
EARTRAHIG

SEQ ID NO: 176 - protein, 9 aa, synthetic construct
EARVIRSNV

SEQ ID NO: 177 - protein, 9 aa, synthetic construct
EARYKGTQY

SEQ ID NO: 178 - protein, 9 aa, synthetic construct
EASIKKQAM

SEQ ID NO: 179 - protein, 9 aa, synthetic construct
EASKRMIVK

SEQ ID NO: 180 - protein, 9 aa, synthetic construct
ECHKIKKGY

SEQ ID NO: 181 - protein, 9 aa, synthetic construct
ECRFNRKKG

SEQ ID NO: 182 - protein, 9 aa, synthetic construct
EERPRIITR

SEQ ID NO: 183 - protein, 9 aa, synthetic construct
EFHRKTRAS

SEQ ID NO: 184 - protein, 9 aa, synthetic construct
EFKPRKSGA

SEQ ID NO: 185 - protein, 9 aa, synthetic construct
EFKRKHIQQ

SEQ ID NO: 186 - protein, 9 aa, synthetic construct
EFRAQRTLA

SEQ ID NO: 187 - protein, 9 aa, synthetic construct
EFRKSGSCY

SEQ ID NO: 188 - protein, 9 aa, synthetic construct
EFRMVRAQE

SEQ ID NO: 189 - protein, 9 aa, synthetic construct
EFRYQRAHC

SEQ ID NO: 190 - protein, 9 aa, synthetic construct
EFSSRWSVF

SEQ ID NO: 191 - protein, 9 aa, synthetic construct
EGKPRSRLG

SEQ ID NO: 192 - protein, 9 aa, synthetic construct
EGKSRRHHD

SEQ ID NO: 193 - protein, 9 aa, synthetic construct
EGKYGKKHG

SEQ ID NO: 194 - protein, 9 aa, synthetic construct
EGRGMRRQC

SEQ ID NO: 195 - protein, 9 aa, synthetic construct
EHKQKMRER

SEQ ID NO: 196 - protein, 9 aa, synthetic construct
EHRPVRSQM

SEQ ID NO: 197 - protein, 9 aa, synthetic construct
EHRTRHGWT

SEQ ID NO: 198 - protein, 9 aa, synthetic construct
EHVRLKHLA

SEQ ID NO: 199 - protein, 9 aa, synthetic construct
EIAKYRWVQ

SEQ ID NO: 200 - protein, 9 aa, synthetic construct
EIKPCRHRC

SEQ ID NO: 201 - protein, 9 aa, synthetic construct
EIKPRRIAS

SEQ ID NO: 202 - protein, 9 aa, synthetic construct
EIKSKKKFD

SEQ ID NO: 203 - protein, 9 aa, synthetic construct
EIKWQRGYY

SEQ ID NO: 204 - protein, 9 aa, synthetic construct
EIRKSGHKQ

SEQ ID NO: 205 - protein, 9 aa, synthetic construct
EIRMNKSNA

SEQ ID NO: 206 - protein, 9 aa, synthetic construct
EIRTSKEAR

SEQ ID NO: 207 - protein, 9 aa, synthetic construct
EIWKCRRQV

SEQ ID NO: 208 - protein, 9 aa, synthetic construct
EKAIMKLRS

SEQ ID NO: 209 - protein, 9 aa, synthetic construct
EKAPSKKGI

SEQ ID NO: 210 - protein, 9 aa, synthetic construct
EKGYNKHRG

SEQ ID NO: 211 - protein, 9 aa, synthetic construct
EKKLLNRWW

SEQ ID NO: 212 - protein, 9 aa, synthetic construct
EKKPKNRYN

SEQ ID NO: 213 - protein, 9 aa, synthetic construct
EKKTKQRMQ

SEQ ID NO: 214 - protein, 9 aa, synthetic construct
EKKWRGIMP

SEQ ID NO: 215 - protein, 9 aa, synthetic construct
EKREKHRQT

SEQ ID NO: 216 - protein, 9 aa, synthetic construct
EKVRTCWRG

SEQ ID NO: 217 - protein, 9 aa, synthetic construct
ELKGKKAIQ

SEQ ID NO: 218 - protein, 9 aa, synthetic construct
ELRRYGFQH

SEQ ID NO: 219 - protein, 9 aa, synthetic construct
EMKAKKCHT

SEQ ID NO: 220 - protein, 9 aa, synthetic construct
EMKLMKKVW

SEQ ID NO: 221 - protein, 9 aa, synthetic construct
EMKMGRQWA

SEQ ID NO: 222 - protein, 9 aa, synthetic construct
EMKQMRKFP

SEQ ID NO: 223 - protein, 9 aa, synthetic construct
EMRVKRTER

SEQ ID NO: 224 - protein, 9 aa, synthetic construct
ENKSAKRGC

SEQ ID NO: 225 - protein, 9 aa, synthetic construct
ENTRRKFTS

SEQ ID NO: 226 - protein, 9 aa, synthetic construct
EPKLKVYKS

SEQ ID NO: 227 - protein, 9 aa, synthetic construct
EPKSRPFKC

SEQ ID NO: 228 - protein, 9 aa, synthetic construct
EQARSRKVG

SEQ ID NO: 229 - protein, 9 aa, synthetic construct
EQGRTKKMY

SEQ ID NO: 230 - protein, 9 aa, synthetic construct
EQKLRKAMP

SEQ ID NO: 231 - protein, 9 aa, synthetic construct
EQKNSRAQF

SEQ ID NO: 232 - protein, 9 aa, synthetic construct
EQRQFRAKD

SEQ ID NO: 233 - protein, 9 aa, synthetic construct
EQRSSRYAA

SEQ ID NO: 234 - protein, 9 aa, synthetic construct
ERCRFKNGN

SEQ ID NO: 235 - protein, 9 aa, synthetic construct
ERHTMHKAP

SEQ ID NO: 236 - protein, 9 aa, synthetic construct
ERKGTVKMT

SEQ ID NO: 237 - protein, 9 aa, synthetic construct
ERKQKGTCG

SEQ ID NO: 238 - protein, 9 aa, synthetic construct
ERVQARKYC

SEQ ID NO: 239 - protein, 9 aa, synthetic construct
ESFKRKVGH

SEQ ID NO: 240 - protein, 9 aa, synthetic construct
ESKSYKCLN

SEQ ID NO: 241 - protein, 9 aa, synthetic construct
ESMRGRKMP

SEQ ID NO: 242 - protein, 9 aa, synthetic construct
ESRDVRAMN

SEQ ID NO: 243 - protein, 9 aa, synthetic construct
ESRFNRSQG

SEQ ID NO: 244 - protein, 9 aa, synthetic construct
ESRFRKDSN

SEQ ID NO: 245 - protein, 9 aa, synthetic construct
ESRIKREWH

SEQ ID NO: 246 - protein, 9 aa, synthetic construct
ESRKAHHDR

SEQ ID NO: 247 - protein, 9 aa, synthetic construct
ESRPFRRFH

SEQ ID NO: 248 - protein, 9 aa, synthetic construct
ETARKGRWY

SEQ ID NO: 249 - protein, 9 aa, synthetic construct
ETKKHSSFW

SEQ ID NO: 250 - protein, 9 aa, synthetic construct
ETKLFKWQD

SEQ ID NO: 251 - protein, 9 aa, synthetic construct
ETKLKKADK

SEQ ID NO: 252 - protein, 9 aa, synthetic construct
ETKRHQMAQ

SEQ ID NO: 253 - protein, 9 aa, synthetic construct
ETKRRQCGY

SEQ ID NO: 254 - protein, 9 aa, synthetic construct
ETKVHKVIG

SEQ ID NO: 255 - protein, 9 aa, synthetic construct
ETKYRKRAE

SEQ ID NO: 256 - protein, 9 aa, synthetic construct
ETRAGRTKG

SEQ ID NO: 257 - protein, 9 aa, synthetic construct
ETRHRMVGC

SEQ ID NO: 258 - protein, 9 aa, synthetic construct
ETRLGKHTY

SEQ ID NO: 259 - protein, 9 aa, synthetic construct
ETRLMRSVD

SEQ ID NO: 260 - protein, 9 aa, synthetic construct
ETRPQRMGH

SEQ ID NO: 261 - protein, 9 aa, synthetic construct
ETRRIQRWD

SEQ ID NO: 262 - protein, 9 aa, synthetic construct
ETRYRANIG

SEQ ID NO: 263 - protein, 9 aa, synthetic construct
ETVRQKHNQ

SEQ ID NO: 264 - protein, 9 aa, synthetic construct
EVKIKKRTI

SEQ ID NO: 265 - protein, 9 aa, synthetic construct
EVKNKGRGQ

SEQ ID NO: 266 - protein, 9 aa, synthetic construct
EVKPARSTF

SEQ ID NO: 267 - protein, 9 aa, synthetic construct
EVKSRQCWQ

SEQ ID NO: 268 - protein, 9 aa, synthetic construct
EVLRMRHEQ

SEQ ID NO: 269 - protein, 9 aa, synthetic construct
EVNRNKMRT

SEQ ID NO: 270 - protein, 9 aa, synthetic construct
EVQRSKRIS

SEQ ID NO: 271 - protein, 9 aa, synthetic construct
EVRPFRQGQ

SEQ ID NO: 272 - protein, 9 aa, synthetic construct
EVRSSRLQN

SEQ ID NO: 273 - protein, 9 aa, synthetic construct
EWKKRTTWN

SEQ ID NO: 274 - protein, 9 aa, synthetic construct
EYARFKGHQ

SEQ ID NO: 275 - protein, 9 aa, synthetic construct
EYKHKKTGW

SEQ ID NO: 276 - protein, 9 aa, synthetic construct
EYKLQRSAQ

SEQ ID NO: 277 - protein, 9 aa, synthetic construct
FAKDRRNPG

SEQ ID NO: 278 - protein, 9 aa, synthetic construct
FAKEMRVYE

SEQ ID NO: 279 - protein, 9 aa, synthetic construct
FAKMSGRYA

SEQ ID NO: 280 - protein, 9 aa, synthetic construct
FAMDIRFAQ

SEQ ID NO: 281 - protein, 9 aa, synthetic construct
FAVARSQQC

SEQ ID NO: 282 - protein, 9 aa, synthetic construct
FMKNKRNYG

SEQ ID NO: 283 - protein, 9 aa, synthetic construct
FPRNVTMLS

SEQ ID NO: 284 - protein, 9 aa, synthetic construct
FQAPSRISP

SEQ ID NO: 285 - protein, 9 aa, synthetic construct
FRDCKIRRY

SEQ ID NO: 286 - protein, 9 aa, synthetic construct
FSQATRRQV

SEQ ID NO: 287 - protein, 9 aa, synthetic construct
FTKAWAKRE

SEQ ID NO: 288 - protein, 9 aa, synthetic construct
FVWSYMFGP

SEQ ID NO: 289 - protein, 9 aa, synthetic construct
GAFCRLSAD

SEQ ID NO: 290 - protein, 9 aa, synthetic construct
GAIRSTHSC

SEQ ID NO: 291 - protein, 9 aa, synthetic construct
GAKTFQKLQ

SEQ ID NO: 292 - protein, 9 aa, synthetic construct
GERLGRKVP

SEQ ID NO: 293 - protein, 9 aa, synthetic construct
GFRMKEKMS

SEQ ID NO: 294 - protein, 9 aa, synthetic construct
GFVKTNKSA

SEQ ID NO: 295 - protein, 9 aa, synthetic construct
GFWPYLYMG

SEQ ID NO: 296 - protein, 9 aa, synthetic construct
GIGQKKSWY

SEQ ID NO: 297 - protein, 9 aa, synthetic construct
GIKSHKREP

SEQ ID NO: 298 - protein, 9 aa, synthetic construct
GIVRRNTAN

SEQ ID NO: 299 - protein, 9 aa, synthetic construct
GKGTMCCEC

SEQ ID NO: 300 - protein, 9 aa, synthetic construct
GKNRCKFQC

SEQ ID NO: 301 - protein, 9 aa, synthetic construct
GLGTKQFRN

SEQ ID NO: 302 - protein, 9 aa, synthetic construct
GMAVKRREP

SEQ ID NO: 303 - protein, 9 aa, synthetic construct
GMFKLNQSC

SEQ ID NO: 304 - protein, 9 aa, synthetic construct
GMKVHRKAP

SEQ ID NO: 305 - protein, 9 aa, synthetic construct
GMLQNRSHQ

SEQ ID NO: 306 - protein, 9 aa, synthetic construct
GNKATNIML

SEQ ID NO: 307 - protein, 9 aa, synthetic construct
GQGLFRRQC

SEQ ID NO: 308 - protein, 9 aa, synthetic construct
GQKGSGRQA

SEQ ID NO: 309 - protein, 9 aa, synthetic construct
GQKLRTSSG

SEQ ID NO: 310 - protein, 9 aa, synthetic construct
GRSQKDWGI

SEQ ID NO: 311 - protein, 9 aa, synthetic construct
GSAWQIWSD

SEQ ID NO: 312 - protein, 9 aa, synthetic construct
GSKFTRQCY

SEQ ID NO: 313 - protein, 9 aa, synthetic construct
GSKQQKGGV

SEQ ID NO: 314 - protein, 9 aa, synthetic construct
GSKQTTGYT

SEQ ID NO: 315 - protein, 9 aa, synthetic construct
GSKSHSHWM

SEQ ID NO: 316 - protein, 9 aa, synthetic construct
GSKSNYHSG

SEQ ID NO: 317 - protein, 9 aa, synthetic construct
GSSSKTTCC

SEQ ID NO: 318 - protein, 9 aa, synthetic construct
GTAGCKKAA

SEQ ID NO: 319 - protein, 9 aa, synthetic construct
GTAMFRVSA

SEQ ID NO: 320 - protein, 9 aa, synthetic construct
GTIKRMTAY

SEQ ID NO: 321 - protein, 9 aa, synthetic construct
GTKVKNCRN

SEQ ID NO: 322 - protein, 9 aa, synthetic construct
GTKWSKKWQ

SEQ ID NO: 323 - protein, 9 aa, synthetic construct
GVFDIRKNP

SEQ ID NO: 324 - protein, 9 aa, synthetic construct
GVHWKKTAY

SEQ ID NO: 325 - protein, 9 aa, synthetic construct
GVKFRNKTN

SEQ ID NO: 326 - protein, 9 aa, synthetic construct
GVKLHTPFS

SEQ ID NO: 327 - protein, 9 aa, synthetic construct
GVTGRFCCQ

SEQ ID NO: 328 - protein, 9 aa, synthetic construct
GVVLIRQDD

SEQ ID NO: 329 - protein, 9 aa, synthetic construct
GYKQQRNRD

SEQ ID NO: 330 - protein, 9 aa, synthetic construct
GYKQTHWLG

SEQ ID NO: 331 - protein, 9 aa, synthetic construct
GYWWLFADR

SEQ ID NO: 332 - protein, 9 aa, synthetic construct
HASRKGTFP

SEQ ID NO: 333 - protein, 9 aa, synthetic construct
HAWPMPATW

SEQ ID NO: 334 - protein, 9 aa, synthetic construct
HKQWNYCPS

SEQ ID NO: 335 - protein, 9 aa, synthetic construct
HKRTAPWTN

SEQ ID NO: 336 - protein, 9 aa, synthetic construct
HQKYKKLTG

SEQ ID NO: 337 - protein, 9 aa, synthetic construct
HRRPFQTKT

SEQ ID NO: 338 - protein, 9 aa, synthetic construct
HVRSNLPIC

SEQ ID NO: 339 - protein, 9 aa, synthetic construct
IAFQYQNRL

SEQ ID NO: 340 - protein, 9 aa, synthetic construct
IAKMKSRYP

SEQ ID NO: 341 - protein, 9 aa, synthetic construct
IARSGWMSG

SEQ ID NO: 342 - protein, 9 aa, synthetic construct
IAYHYWKDV

SEQ ID NO: 343 - protein, 9 aa, synthetic construct
ICLKRHAKA

SEQ ID NO: 344 - protein, 9 aa, synthetic construct
IEKQRRVYA

SEQ ID NO: 345 - protein, 9 aa, synthetic construct
IGAKRSWTS

SEQ ID NO: 346 - protein, 9 aa, synthetic construct
IGIPKNHKP

SEQ ID NO: 347 - protein, 9 aa, synthetic construct
IGRWMINSM

SEQ ID NO: 348 - protein, 9 aa, synthetic construct
IGVKAHRSA

SEQ ID NO: 349 - protein, 9 aa, synthetic construct
IHHTNFHSP

SEQ ID NO: 350 - protein, 9 aa, synthetic construct
IHMKRAAYS

SEQ ID NO: 351 - protein, 9 aa, synthetic construct
IIKPRSKVD

SEQ ID NO: 352 - protein, 9 aa, synthetic construct
IKQKGELKC

SEQ ID NO: 353 - protein, 9 aa, synthetic construct
ILLKHMKYP

SEQ ID NO: 354 - protein, 9 aa, synthetic construct
IMKDRKSGS

SEQ ID NO: 355 - protein, 9 aa, synthetic construct
IMPRCWDMC

SEQ ID NO: 356 - protein, 9 aa, synthetic construct
IPQPSRKMP

SEQ ID NO: 357 - protein, 9 aa, synthetic construct
IPRTINRCT

SEQ ID NO: 358 - protein, 9 aa, synthetic construct
IQHRFLTYQ

SEQ ID NO: 359 - protein, 9 aa, synthetic construct
IQKCMTRQA

SEQ ID NO: 360 - protein, 9 aa, synthetic construct
ISTQPRQQS

SEQ ID NO: 361 - protein, 9 aa, synthetic construct
ISWIQRTCM

SEQ ID NO: 362 - protein, 9 aa, synthetic construct
ITFGTRKDA

SEQ ID NO: 363 - protein, 9 aa, synthetic construct
ITFWKMRDG

SEQ ID NO: 364 - protein, 9 aa, synthetic construct
ITKDIRWKG

SEQ ID NO: 365 - protein, 9 aa, synthetic construct
ITRDSRWGM

SEQ ID NO: 366 - protein, 9 aa, synthetic construct
ITTTARKVP

SEQ ID NO: 367 - protein, 9 aa, synthetic construct
IVKEVRTNH

SEQ ID NO: 368 - protein, 9 aa, synthetic construct
IVKPRGQCI

SEQ ID NO: 369 - protein, 9 aa, synthetic construct
IVKQLKRTA

SEQ ID NO: 370 - protein, 9 aa, synthetic construct
IVKYRVGTS

SEQ ID NO: 371 - protein, 9 aa, synthetic construct
IVVESENRH

SEQ ID NO: 372 - protein, 9 aa, synthetic construct
IVVRRFYDP

SEQ ID NO: 373 - protein, 9 aa, synthetic construct
IVYSSRQNP

SEQ ID NO: 374 - protein, 9 aa, synthetic construct
KAGTPGIQN

SEQ ID NO: 375 - protein, 9 aa, synthetic construct
KEARHTRRE

SEQ ID NO: 376 - protein, 9 aa, synthetic construct
KEFLYLSRE

SEQ ID NO: 377 - protein, 9 aa, synthetic construct
KEKEYKKYF

SEQ ID NO: 378 - protein, 9 aa, synthetic construct
KFRDAQNMS

SEQ ID NO: 379 - protein, 9 aa, synthetic construct
KIKVANAAS

SEQ ID NO: 380 - protein, 9 aa, synthetic construct
KKPANMFPW

SEQ ID NO: 381 - protein, 9 aa, synthetic construct
KNRAVQGFN

SEQ ID NO: 382 - protein, 9 aa, synthetic construct
KPGMVMNPN

SEQ ID NO: 383 - protein, 9 aa, synthetic construct
KPRPKLNST

SEQ ID NO: 384 - protein, 9 aa, synthetic construct
KQRHWGAKW

SEQ ID NO: 385 - protein, 9 aa, synthetic construct
KQRSGWCCH

SEQ ID NO: 386 - protein, 9 aa, synthetic construct
KSCKGRANG

SEQ ID NO: 387 - protein, 9 aa, synthetic construct
KSFYGEHYF

SEQ ID NO: 388 - protein, 9 aa, synthetic construct
KSNQMGKSP

SEQ ID NO: 389 - protein, 9 aa, synthetic construct
KVKVRACSD

SEQ ID NO: 390 - protein, 9 aa, synthetic construct
LAKDCRACN

SEQ ID NO: 391 - protein, 9 aa, synthetic construct
LAKFKNKIL

SEQ ID NO: 392 - protein, 9 aa, synthetic construct
LANTYHWEQ

SEQ ID NO: 393 - protein, 9 aa, synthetic construct
LANVKGRVA

SEQ ID NO: 394 - protein, 9 aa, synthetic construct
LAPRKQVQW

SEQ ID NO: 395 - protein, 9 aa, synthetic construct
LARAKTSSV

SEQ ID NO: 396 - protein, 9 aa, synthetic construct
LARYLGSQN

SEQ ID NO: 397 - protein, 9 aa, synthetic construct
LCKEGRKAG

SEQ ID NO: 398 - protein, 9 aa, synthetic construct
LCKWSKKQC

SEQ ID NO: 399 - protein, 9 aa, synthetic construct
LFRMNMRTH

SEQ ID NO: 400 - protein, 9 aa, synthetic construct
LGKSRKQMA

SEQ ID NO: 401 - protein, 9 aa, synthetic construct
LIECRRRCP

SEQ ID NO: 402 - protein, 9 aa, synthetic construct
LIKCKDRFT

SEQ ID NO: 403 - protein, 9 aa, synthetic construct
LIKWNRKAM

SEQ ID NO: 404 - protein, 9 aa, synthetic construct
LIRLYTNKE

SEQ ID NO: 405 - protein, 9 aa, synthetic construct
LLCKVKDYQ

SEQ ID NO: 406 - protein, 9 aa, synthetic construct
LLIKKNRGV

SEQ ID NO: 407 - protein, 9 aa, synthetic construct
LLRLAQQGP

SEQ ID NO: 408 - protein, 9 aa, synthetic construct
LLRMTTYAW

SEQ ID NO: 409 - protein, 9 aa, synthetic construct
LMKICKSFP

SEQ ID NO: 410 - protein, 9 aa, synthetic construct
LMWSRFEVP

SEQ ID NO: 411 - protein, 9 aa, synthetic construct
LNMHYRSHK

SEQ ID NO: 412 - protein, 9 aa, synthetic construct
LNRQRGHAS

SEQ ID NO: 413 - protein, 9 aa, synthetic construct
LPERCRKQS

SEQ ID NO: 414 - protein, 9 aa, synthetic construct
LPKPTKKGP

SEQ ID NO: 415 - protein, 9 aa, synthetic construct
LPKSTKRWG

SEQ ID NO: 416 - protein, 9 aa, synthetic construct
LQKMSRFMN

SEQ ID NO: 417 - protein, 9 aa, synthetic construct
LQKTRSIIQ

SEQ ID NO: 418 - protein, 9 aa, synthetic construct
LQTKKNRHY

SEQ ID NO: 419 - protein, 9 aa, synthetic construct
LRVPRYGQS

SEQ ID NO: 420 - protein, 9 aa, synthetic construct
LSKKRERCN

SEQ ID NO: 421 - protein, 9 aa, synthetic construct
LSKTKSYVE

SEQ ID NO: 422 - protein, 9 aa, synthetic construct
LTRFHGGMY

SEQ ID NO: 423 - protein, 9 aa, synthetic construct
LVKDRCSGY

SEQ ID NO: 424 - protein, 9 aa, synthetic construct
LVRMHRSDQ

SEQ ID NO: 425 - protein, 9 aa, synthetic construct
LVSRLPSMR

SEQ ID NO: 426 - protein, 9 aa, synthetic construct
LVVQRNVRQ

SEQ ID NO: 427 - protein, 9 aa, synthetic construct
LWKTSRQCN

SEQ ID NO: 428 - protein, 9 aa, synthetic construct
LYIHRWVSG

SEQ ID NO: 429 - protein, 9 aa, synthetic construct
MAEHQIVTT

SEQ ID NO: 430 - protein, 9 aa, synthetic construct
MAIRGTKAN

SEQ ID NO: 431 - protein, 9 aa, synthetic construct
MAKLCQRKC

SEQ ID NO: 432 - protein, 9 aa, synthetic construct
MALDFRNGK

SEQ ID NO: 433 - protein, 9 aa, synthetic construct
MCAGYHREQ

SEQ ID NO: 434 - protein, 9 aa, synthetic construct
MCKAHMRKD

SEQ ID NO: 435 - protein, 9 aa, synthetic construct
MCTATSRYK

SEQ ID NO: 436 - protein, 9 aa, synthetic construct
MEKQLKLHN

SEQ ID NO: 437 - protein, 9 aa, synthetic construct
MFVTYYTLY

SEQ ID NO: 438 - protein, 9 aa, synthetic construct
MGAPKKTLG

SEQ ID NO: 439 - protein, 9 aa, synthetic construct
MHWSVHYNS

SEQ ID NO: 440 - protein, 9 aa, synthetic construct
MHYLAMSAR

SEQ ID NO: 441 - protein, 9 aa, synthetic construct
MIAEDEYWA

SEQ ID NO: 442 - protein, 9 aa, synthetic construct
MIDSRKRSA

SEQ ID NO: 443 - protein, 9 aa, synthetic construct
MISLKKKMS

SEQ ID NO: 444 - protein, 9 aa, synthetic construct
MKILKYSQE

SEQ ID NO: 445 - protein, 9 aa, synthetic construct
MKKDKTNST

SEQ ID NO: 446 - protein, 9 aa, synthetic construct
MKLNRNHDC

SEQ ID NO: 447 - protein, 9 aa, synthetic construct
MKSRPFMGS

SEQ ID NO: 448 - protein, 9 aa, synthetic construct
MMAGMRISS

SEQ ID NO: 449 - protein, 9 aa, synthetic construct
MMAKPLWAY

SEQ ID NO: 450 - protein, 9 aa, synthetic construct
MMHQVTHDF

SEQ ID NO: 451 - protein, 9 aa, synthetic construct
MMKGRSYCT

SEQ ID NO: 452 - protein, 9 aa, synthetic construct
MMKPKGHYP

SEQ ID NO: 453 - protein, 9 aa, synthetic construct
MNIKKNHWA

SEQ ID NO: 454 - protein, 9 aa, synthetic construct
MPKRACNKW

SEQ ID NO: 455 - protein, 9 aa, synthetic construct
MPWKIDTGG

SEQ ID NO: 456 - protein, 9 aa, synthetic construct
MQKTSKKYQ

SEQ ID NO: 457 - protein, 9 aa, synthetic construct
MQQRVFRSN

SEQ ID NO: 458 - protein, 9 aa, synthetic construct
MQSLKSRWH

SEQ ID NO: 459 - protein, 9 aa, synthetic construct
MSFKDLKNG

SEQ ID NO: 460 - protein, 9 aa, synthetic construct
MSGSRRNAE

SEQ ID NO: 461 - protein, 9 aa, synthetic construct
MSKQKKAGS

SEQ ID NO: 462 - protein, 9 aa, synthetic construct
MSKSRSLNN

SEQ ID NO: 463 - protein, 9 aa, synthetic construct
MSPFVRKAS

SEQ ID NO: 464 - protein, 9 aa, synthetic construct
MSRESRSVS

SEQ ID NO: 465 - protein, 9 aa, synthetic construct
MSWLERKAN

SEQ ID NO: 466 - protein, 9 aa, synthetic construct
MTEGKKRIP

SEQ ID NO: 467 - protein, 9 aa, synthetic construct
MTGKSPRGA

SEQ ID NO: 468 - protein, 9 aa, synthetic construct
MTGVRWRSQ

SEQ ID NO: 469 - protein, 9 aa, synthetic construct
MTIYQRGAA

SEQ ID NO: 470 - protein, 9 aa, synthetic construct
MTMCLKKYY

SEQ ID NO: 471 - protein, 9 aa, synthetic construct
MTMTMLPWY

SEQ ID NO: 472 - protein, 9 aa, synthetic construct
MTRGHSIWG

SEQ ID NO: 473 - protein, 9 aa, synthetic construct
MTRMRLSGP

SEQ ID NO: 474 - protein, 9 aa, synthetic construct
MTTSRQRCW

SEQ ID NO: 475 - protein, 9 aa, synthetic construct
MTWYHDIHQ

SEQ ID NO: 476 - protein, 9 aa, synthetic construct
MVKHHRESF

SEQ ID NO: 477 - protein, 9 aa, synthetic construct
MVKWSWHKC

SEQ ID NO: 478 - protein, 9 aa, synthetic construct
MVMKRVMVP

SEQ ID NO: 479 - protein, 9 aa, synthetic construct
MVVPAKYKW

SEQ ID NO: 480 - protein, 9 aa, synthetic construct
MVWSADSYE

SEQ ID NO: 481 - protein, 9 aa, synthetic construct
MWKDIRQWH

SEQ ID NO: 482 - protein, 9 aa, synthetic construct
MWKSRLDSY

SEQ ID NO: 483 - protein, 9 aa, synthetic construct
MYKCGIKCH

SEQ ID NO: 484 - protein, 9 aa, synthetic construct
MYRAKLTAQ

SEQ ID NO: 485 - protein, 9 aa, synthetic construct
NAMWLRHYD

SEQ ID NO: 486 - protein, 9 aa, synthetic construct
NCAQYYGTG

SEQ ID NO: 487 - protein, 9 aa, synthetic construct
NFKDMRSQE

SEQ ID NO: 488 - protein, 9 aa, synthetic construct
NIGLKKKYF

SEQ ID NO: 489 - protein, 9 aa, synthetic construct
NIRQPNQCA

SEQ ID NO: 490 - protein, 9 aa, synthetic construct
NKHSQRREA

SEQ ID NO: 491 - protein, 9 aa, synthetic construct
NKRDHKYWG

SEQ ID NO: 492 - protein, 9 aa, synthetic construct
NKTKSHYGN

SEQ ID NO: 493 - protein, 9 aa, synthetic construct
NMNHVAFAY

SEQ ID NO: 494 - protein, 9 aa, synthetic construct
NMYMYRAQH

SEQ ID NO: 495 - protein, 9 aa, synthetic construct
NNKGLSQNT

SEQ ID NO: 496 - protein, 9 aa, synthetic construct
NQRLYAKSE

SEQ ID NO: 497 - protein, 9 aa, synthetic construct
NRMRYSCYS

SEQ ID NO: 498 - protein, 9 aa, synthetic construct
NSKTWGTLS

SEQ ID NO: 499 - protein, 9 aa, synthetic construct
NTFISYRDQ

SEQ ID NO: 500 - protein, 9 aa, synthetic construct
NTGKRSRQA

SEQ ID NO: 501 - protein, 9 aa, synthetic construct
NTHALGRHG

SEQ ID NO: 502 - protein, 9 aa, synthetic construct
NTKLSRYGM

SEQ ID NO: 503 - protein, 9 aa, synthetic construct
NTKSAVKQP

SEQ ID NO: 504 - protein, 9 aa, synthetic construct
NTLPSRYGN

SEQ ID NO: 505 - protein, 9 aa, synthetic construct
NTNFRNMSW

SEQ ID NO: 506 - protein, 9 aa, synthetic construct
NTNPSGKNF

SEQ ID NO: 507 - protein, 9 aa, synthetic construct
NTYCKKHCS

SEQ ID NO: 508 - protein, 9 aa, synthetic construct
NVAPKSHKW

SEQ ID NO: 509 - protein, 9 aa, synthetic construct
NVAWRTRDL

SEQ ID NO: 510 - protein, 9 aa, synthetic construct
NVKGIAHYC

SEQ ID NO: 511 - protein, 9 aa, synthetic construct
NVKTLHHMW

SEQ ID NO: 512 - protein, 9 aa, synthetic construct
NVSMLGRWN

SEQ ID NO: 513 - protein, 9 aa, synthetic construct
NVTNQKKTW

SEQ ID NO: 514 - protein, 9 aa, synthetic construct
NWNPCRKNA

SEQ ID NO: 515 - protein, 9 aa, synthetic construct
NYWWMLSGP

SEQ ID NO: 516 - protein, 9 aa, synthetic construct
PCGGKVIKA

SEQ ID NO: 517 - protein, 9 aa, synthetic construct
PKRKGNEWC

SEQ ID NO: 518 - protein, 9 aa, synthetic construct
PMKPTKYAH

SEQ ID NO: 519 - protein, 9 aa, synthetic construct
PSSVKQTKA

SEQ ID NO: 520 - protein, 9 aa, synthetic construct
PTKVLNRYN

SEQ ID NO: 521 - protein, 9 aa, synthetic construct
PWAGTRWKQ

SEQ ID NO: 522 - protein, 9 aa, synthetic construct
QAGCKGTWR

SEQ ID NO: 523 - protein, 9 aa, synthetic construct
QAHMFFKHE

SEQ ID NO: 524 - protein, 9 aa, synthetic construct
QAKWRNLWN

SEQ ID NO: 525 - protein, 9 aa, synthetic construct
QAMHYWRYP

SEQ ID NO: 526 - protein, 9 aa, synthetic construct
QARDRTAQF

SEQ ID NO: 527 - protein, 9 aa, synthetic construct
QAVARGNLK

SEQ ID NO: 528 - protein, 9 aa, synthetic construct
QCCKRKTGL

SEQ ID NO: 529 - protein, 9 aa, synthetic construct
QCKLKGNLM

SEQ ID NO: 530 - protein, 9 aa, synthetic construct
QCKTKKSAS

SEQ ID NO: 531 - protein, 9 aa, synthetic construct
QCKYRYTKG

SEQ ID NO: 532 - protein, 9 aa, synthetic construct
QCQPRKHTP

SEQ ID NO: 533 - protein, 9 aa, synthetic construct
QCVCKKMKG

SEQ ID NO: 534 - protein, 9 aa, synthetic construct
QCWPTMKCD

SEQ ID NO: 535 - protein, 9 aa, synthetic construct
QDYQEDGKK

SEQ ID NO: 536 - protein, 9 aa, synthetic construct
QEKKKANLT

SEQ ID NO: 537 - protein, 9 aa, synthetic construct
QFKLKTRES

SEQ ID NO: 538 - protein, 9 aa, synthetic construct
QGAGGRKDQ

SEQ ID NO: 539 - protein, 9 aa, synthetic construct
QGALYKKQF

SEQ ID NO: 540 - protein, 9 aa, synthetic construct
QIAKVQKTR

SEQ ID NO: 541 - protein, 9 aa, synthetic construct
QIFRLPQAG

SEQ ID NO: 542 - protein, 9 aa, synthetic construct
QIRDKSRHH

SEQ ID NO: 543 - protein, 9 aa, synthetic construct
QLTRYMKST

SEQ ID NO: 544 - protein, 9 aa, synthetic construct
QMHHKKNWM

SEQ ID NO: 545 - protein, 9 aa, synthetic construct
QMHPESYSA

SEQ ID NO: 546 - protein, 9 aa, synthetic construct
QMKSKTKWL

SEQ ID NO: 547 - protein, 9 aa, synthetic construct
QMWFRYASE

SEQ ID NO: 548 - protein, 9 aa, synthetic construct
QNSQIKKVG

SEQ ID NO: 549 - protein, 9 aa, synthetic construct
QPEQRRKVP

SEQ ID NO: 550 - protein, 9 aa, synthetic construct
QPKLRSQVM

SEQ ID NO: 551 - protein, 9 aa, synthetic construct
QPKTRSMYQ

SEQ ID NO: 552 - protein, 9 aa, synthetic construct
QPKVNRHTG

SEQ ID NO: 553 - protein, 9 aa, synthetic construct
QPLYFRSQG

SEQ ID NO: 554 - protein, 9 aa, synthetic construct
QQMTKKNFG

SEQ ID NO: 555 - protein, 9 aa, synthetic construct
QSAGRKTVA

SEQ ID NO: 556 - protein, 9 aa, synthetic construct
QSFLSLTPG

SEQ ID NO: 557 - protein, 9 aa, synthetic construct
QSHMYGRIS

SEQ ID NO: 558 - protein, 9 aa, synthetic construct
QSIYFRHGI

SEQ ID NO: 559 - protein, 9 aa, synthetic construct
QSQNLRRQC

SEQ ID NO: 560 - protein, 9 aa, synthetic construct
QSYWNLSYQ

SEQ ID NO: 561 - protein, 9 aa, synthetic construct
QTKTYREGG

SEQ ID NO: 562 - protein, 9 aa, synthetic construct
QTRGGCKRA

SEQ ID NO: 563 - protein, 9 aa, synthetic construct
QTTQPRQWP

SEQ ID NO: 564 - protein, 9 aa, synthetic construct
QVFATLTSW

SEQ ID NO: 565 - protein, 9 aa, synthetic construct
QVFLNLREG

SEQ ID NO: 566 - protein, 9 aa, synthetic construct
QVHGILRAH

SEQ ID NO: 567 - protein, 9 aa, synthetic construct
QVKWKNRFP

SEQ ID NO: 568 - protein, 9 aa, synthetic construct
QVSKCQIRK

SEQ ID NO: 569 - protein, 9 aa, synthetic construct
QVSMRGHYR

SEQ ID NO: 570 - protein, 9 aa, synthetic construct
QVVRNHHKE

SEQ ID NO: 571 - protein, 9 aa, synthetic construct
RCGYHHSQT

SEQ ID NO: 572 - protein, 9 aa, synthetic construct
RCRVAIVWT

SEQ ID NO: 573 - protein, 9 aa, synthetic construct
RFAYWKNQG

SEQ ID NO: 574 - protein, 9 aa, synthetic construct
RHQKRNWAN

SEQ ID NO: 575 - protein, 9 aa, synthetic construct
RMFSVPMWD

SEQ ID NO: 576 - protein, 9 aa, synthetic construct
RNKPIKHGP

SEQ ID NO: 577 - protein, 9 aa, synthetic construct
RPNRVMARM

SEQ ID NO: 578 - protein, 9 aa, synthetic construct
RTCYWSANE

SEQ ID NO: 579 - protein, 9 aa, synthetic construct
RVHPWSQRQ

SEQ ID NO: 580 - protein, 9 aa, synthetic construct
RWKDKNKLM

SEQ ID NO: 581 - protein, 9 aa, synthetic construct
RWKHLKGVC

SEQ ID NO: 582 - protein, 9 aa, synthetic construct
SAGWRSHCV

SEQ ID NO: 583 - protein, 9 aa, synthetic construct
SALYHGAGF

SEQ ID NO: 584 - protein, 9 aa, synthetic construct
SASWKGKTP

SEQ ID NO: 585 - protein, 9 aa, synthetic construct
SCKPKSKST

SEQ ID NO: 586 - protein, 9 aa, synthetic construct
SCMRKGRFQ

SEQ ID NO: 587 - protein, 9 aa, synthetic construct
SDVRKPRQH

SEQ ID NO: 588 - protein, 9 aa, synthetic construct
SECNNPFVM

SEQ ID NO: 589 - protein, 9 aa, synthetic construct
SGCQMKRAF

SEQ ID NO: 590 - protein, 9 aa, synthetic construct
SHKCKTSMT

SEQ ID NO: 591 - protein, 9 aa, synthetic construct
SHKEIKGQA

SEQ ID NO: 592 - protein, 9 aa, synthetic construct
SHPNTRQGD

SEQ ID NO: 593 - protein, 9 aa, synthetic construct
SIGMRSHMG

SEQ ID NO: 594 - protein, 9 aa, synthetic construct
SIKVQKRAG

SEQ ID NO: 595 - protein, 9 aa, synthetic construct
SIQRLKWVN

SEQ ID NO: 596 - protein, 9 aa, synthetic construct
SKDSFRRCC

SEQ ID NO: 597 - protein, 9 aa, synthetic construct
SKHPRMQQA

SEQ ID NO: 598 - protein, 9 aa, synthetic construct
SKHQYHQDA

SEQ ID NO: 599 - protein, 9 aa, synthetic construct
SKKTGGIQT

SEQ ID NO: 600 - protein, 9 aa, synthetic construct
SLKQQSYRG

SEQ ID NO: 601 - protein, 9 aa, synthetic construct
SLRQNHMHQ

SEQ ID NO: 602 - protein, 9 aa, synthetic construct
SNTTVRKQY

SEQ ID NO: 603 - protein, 9 aa, synthetic construct
SQLSFRSAT

SEQ ID NO: 604 - protein, 9 aa, synthetic construct
SQPRNKFSG

SEQ ID NO: 605 - protein, 9 aa, synthetic construct
SRHRYPKCS

SEQ ID NO: 606 - protein, 9 aa, synthetic construct
SRRVSSRMF

SEQ ID NO: 607 - protein, 9 aa, synthetic construct
SRVKMSRQH

SEQ ID NO: 608 - protein, 9 aa, synthetic construct
SSMPMFSGA

SEQ ID NO: 609 - protein, 9 aa, synthetic construct
STAQKCKFM

SEQ ID NO: 610 - protein, 9 aa, synthetic construct
STFYRFRDP

SEQ ID NO: 611 - protein, 9 aa, synthetic construct
STGPKKNST

SEQ ID NO: 612 - protein, 9 aa, synthetic construct
STKISRLHN

SEQ ID NO: 613 - protein, 9 aa, synthetic construct
STKSRSHYH

SEQ ID NO: 614 - protein, 9 aa, synthetic construct
STSSAKKYP

SEQ ID NO: 615 - protein, 9 aa, synthetic construct
SVGYGKPWQ

SEQ ID NO: 616 - protein, 9 aa, synthetic construct
SVHMNLRAH

SEQ ID NO: 617 - protein, 9 aa, synthetic construct
SVKLRSWSK

SEQ ID NO: 618 - protein, 9 aa, synthetic construct
SVKPCCRNR

SEQ ID NO: 619 - protein, 9 aa, synthetic construct
SVRDIRYGP

SEQ ID NO: 620 - protein, 9 aa, synthetic construct
SWWPLMTWG

SEQ ID NO: 621 - protein, 9 aa, synthetic construct
SYVKPIQRP

SEQ ID NO: 622 - protein, 9 aa, synthetic construct
SYWGYSRAH

SEQ ID NO: 623 - protein, 9 aa, synthetic construct
TAKYRGLWQ

SEQ ID NO: 624 - protein, 9 aa, synthetic construct
TARQFKSPR

SEQ ID NO: 625 - protein, 9 aa, synthetic construct
TASSRLCCH

SEQ ID NO: 626 - protein, 9 aa, synthetic construct
TCKGVSYRT

SEQ ID NO: 627 - protein, 9 aa, synthetic construct
TCKPHGKCT

SEQ ID NO: 628 - protein, 9 aa, synthetic construct
TCKYRSHLA

SEQ ID NO: 629 - protein, 9 aa, synthetic construct
TCRGYNDSY

SEQ ID NO: 630 - protein, 9 aa, synthetic construct
TFTRPLCMS

SEQ ID NO: 631 - protein, 9 aa, synthetic construct
TGAFRRSGA

SEQ ID NO: 632 - protein, 9 aa, synthetic construct
TGKLRGGWH

SEQ ID NO: 633 - protein, 9 aa, synthetic construct
TGRFSSHMH

SEQ ID NO: 634 - protein, 9 aa, synthetic construct
TGVKRNHAG

SEQ ID NO: 635 - protein, 9 aa, synthetic construct
THHKARYTG

SEQ ID NO: 636 - protein, 9 aa, synthetic construct
THKEKRTAI

SEQ ID NO: 637 - protein, 9 aa, synthetic construct
THSSFKKMQ

SEQ ID NO: 638 - protein, 9 aa, synthetic construct
TIIRRNTTT

SEQ ID NO: 639 - protein, 9 aa, synthetic construct
TIIWARSMA

SEQ ID NO: 640 - protein, 9 aa, synthetic construct
TIKTSRTDD

SEQ ID NO: 641 - protein, 9 aa, synthetic construct
TIKYKSGNG

SEQ ID NO: 642 - protein, 9 aa, synthetic construct
TIRDLRTQN

SEQ ID NO: 643 - protein, 9 aa, synthetic construct
TMAQSWRSI

SEQ ID NO: 644 - protein, 9 aa, synthetic construct
TMKSKQRWV

SEQ ID NO: 645 - protein, 9 aa, synthetic construct
TMRSKSCSM

SEQ ID NO: 646 - protein, 9 aa, synthetic construct
TMRWRNHSE

SEQ ID NO: 647 - protein, 9 aa, synthetic construct
TNKFTRKGW

SEQ ID NO: 648 - protein, 9 aa, synthetic construct
TNWLIKWMG

SEQ ID NO: 649 - protein, 9 aa, synthetic construct
TNWPHVKAY

SEQ ID NO: 650 - protein, 9 aa, synthetic construct
TPKSRGVYA

SEQ ID NO: 651 - protein, 9 aa, synthetic construct
TPKVKSSFN

SEQ ID NO: 652 - protein, 9 aa, synthetic construct
TPRPSTRAP

SEQ ID NO: 653 - protein, 9 aa, synthetic construct
TQCQKKTAR

SEQ ID NO: 654 - protein, 9 aa, synthetic construct
TQFQKLADR

SEQ ID NO: 655 - protein, 9 aa, synthetic construct
TQKPKKSGS

SEQ ID NO: 656 - protein, 9 aa, synthetic construct
TQNASRHMQ

SEQ ID NO: 657 - protein, 9 aa, synthetic construct
TQPKLKRES

SEQ ID NO: 658 - protein, 9 aa, synthetic construct
TQRDRMRAN

SEQ ID NO: 659 - protein, 9 aa, synthetic construct
TQRPTTKTR

SEQ ID NO: 660 - protein, 9 aa, synthetic construct
TSAFKKGFT

SEQ ID NO: 661 - protein, 9 aa, synthetic construct
TSHAIIRLQ

SEQ ID NO: 662 - protein, 9 aa, synthetic construct
TSKFFGMFA

SEQ ID NO: 663 - protein, 9 aa, synthetic construct
TSKMPGRAS

SEQ ID NO: 664 - protein, 9 aa, synthetic construct
TSKPNRKKT

SEQ ID NO: 665 - protein, 9 aa, synthetic construct
TSSYKSRFH

SEQ ID NO: 666 - protein, 9 aa, synthetic construct
TSWWLPSMT

SEQ ID NO: 667 - protein, 9 aa, synthetic construct
TTARNQGTG

SEQ ID NO: 668 - protein, 9 aa, synthetic construct
TTKGQVQCM

SEQ ID NO: 669 - protein, 9 aa, synthetic construct
TTKGTGSHN

SEQ ID NO: 670 - protein, 9 aa, synthetic construct
TTKPGRHSY

SEQ ID NO: 671 - protein, 9 aa, synthetic construct
TTKTVREYG

SEQ ID NO: 672 - protein, 9 aa, synthetic construct
TTRYSTAPS

SEQ ID NO: 673 - protein, 9 aa, synthetic construct
TTVKRLNSF

SEQ ID NO: 674 - protein, 9 aa, synthetic construct
TTWTPEQHP

SEQ ID NO: 675 - protein, 9 aa, synthetic construct
TVKNNVLCG

SEQ ID NO: 676 - protein, 9 aa, synthetic construct
TVKPQMVGR

SEQ ID NO: 677 - protein, 9 aa, synthetic construct
TVKWGNKLW

SEQ ID NO: 678 - protein, 9 aa, synthetic construct
TVNIKTRSH

SEQ ID NO: 679 - protein, 9 aa, synthetic construct
TVREKGHDR

SEQ ID NO: 680 - protein, 9 aa, synthetic construct
TVSSRQRTR

SEQ ID NO: 681 - protein, 9 aa, synthetic construct
TWKTRTCAP

SEQ ID NO: 682 - protein, 9 aa, synthetic construct
TWRYVMKEC

SEQ ID NO: 683 - protein, 9 aa, synthetic construct
TYAKYNRMC

SEQ ID NO: 684 - protein, 9 aa, synthetic construct
TYGFPVSVA

SEQ ID NO: 685 - protein, 9 aa, synthetic construct
TYKYKNNYC

SEQ ID NO: 686 - protein, 9 aa, synthetic construct
VAALNLRHP

SEQ ID NO: 687 - protein, 9 aa, synthetic construct
VACKCKNRP

SEQ ID NO: 688 - protein, 9 aa, synthetic construct
VAHNALKMM

SEQ ID NO: 689 - protein, 9 aa, synthetic construct
VAKVMTTAP

SEQ ID NO: 690 - protein, 9 aa, synthetic construct
VAKWRSKHQ

SEQ ID NO: 691 - protein, 9 aa, synthetic construct
VARIKQDMF

SEQ ID NO: 692 - protein, 9 aa, synthetic construct
VASRGGRGC

SEQ ID NO: 693 - protein, 9 aa, synthetic construct
VASSQKRAI

SEQ ID NO: 694 - protein, 9 aa, synthetic construct
VCKVNRKML

SEQ ID NO: 695 - protein, 9 aa, synthetic construct
VCRHRQQMY

SEQ ID NO: 696 - protein, 9 aa, synthetic construct
VCVKKYRCN

SEQ ID NO: 697 - protein, 9 aa, synthetic construct
VGAGYKHCY

SEQ ID NO: 698 - protein, 9 aa, synthetic construct
VHRFVNRDF

SEQ ID NO: 699 - protein, 9 aa, synthetic construct
VIKGQATER

SEQ ID NO: 700 - protein, 9 aa, synthetic construct
VIKSSWFKG

SEQ ID NO: 701 - protein, 9 aa, synthetic construct
VIMRPISQQ

SEQ ID NO: 702 - protein, 9 aa, synthetic construct
VKHKDQWGP

SEQ ID NO: 703 - protein, 9 aa, synthetic construct
VKHRAKFCD

SEQ ID NO: 704 - protein, 9 aa, synthetic construct
VKQFRKCFC

SEQ ID NO: 705 - protein, 9 aa, synthetic construct
VLDRHWAAY

SEQ ID NO: 706 - protein, 9 aa, synthetic construct
VLKQIGRNS

SEQ ID NO: 707 - protein, 9 aa, synthetic construct
VMKDVKKVW

SEQ ID NO: 708 - protein, 9 aa, synthetic construct
VMKDWKGKH

SEQ ID NO: 709 - protein, 9 aa, synthetic construct
VMMLARQSQ

SEQ ID NO: 710 - protein, 9 aa, synthetic construct
VNPYKLWKT

SEQ ID NO: 711 - protein, 9 aa, synthetic construct
VPFNYWRME

SEQ ID NO: 712 - protein, 9 aa, synthetic construct
VPIRVMRHG

SEQ ID NO: 713 - protein, 9 aa, synthetic construct
VPIYTKWKN

SEQ ID NO: 714 - protein, 9 aa, synthetic construct
VQKTSRRGE

SEQ ID NO: 715 - protein, 9 aa, synthetic construct
VQVRRHAHG

SEQ ID NO: 716 - protein, 9 aa, synthetic construct
VSDIANEAF

SEQ ID NO: 717 - protein, 9 aa, synthetic construct
VSKAKSNFR

SEQ ID NO: 718 - protein, 9 aa, synthetic construct
VSPTIRKSP

SEQ ID NO: 719 - protein, 9 aa, synthetic construct
VSSLKKSQF

SEQ ID NO: 720 - protein, 9 aa, synthetic construct
VSTRDKWRN

SEQ ID NO: 721 - protein, 9 aa, synthetic construct
VTCRCKMKH

SEQ ID NO: 722 - protein, 9 aa, synthetic construct
VTDRKQLRG

SEQ ID NO: 723 - protein, 9 aa, synthetic construct
VTKQKCKMN

SEQ ID NO: 724 - protein, 9 aa, synthetic construct
VTQMKHKGW

SEQ ID NO: 725 - protein, 9 aa, synthetic construct
VTRQKCKMN

SEQ ID NO: 726 - protein, 9 aa, synthetic construct
VVGKVMRDC

SEQ ID NO: 727 - protein, 9 aa, synthetic construct
VVKQVGKQA

SEQ ID NO: 728 - protein, 9 aa, synthetic construct
VVNYTALQD

SEQ ID NO: 729 - protein, 9 aa, synthetic construct
VWGLTRHAG

SEQ ID NO: 730 - protein, 9 aa, synthetic construct
WAKPTKKIM

SEQ ID NO: 731 - protein, 9 aa, synthetic construct
WEPGIITGC

SEQ ID NO: 732 - protein, 9 aa, synthetic construct
WVFSIQKQA

SEQ ID NO: 733 - protein, 9 aa, synthetic construct
YIATKLRDQ

SEQ ID NO: 734 - protein, 9 aa, synthetic construct
YIRDRGHYP

SEQ ID NO: 735 - protein, 9 aa, synthetic construct
YIYPITYSQ

SEQ ID NO: 736 - protein, 9 aa, synthetic construct
YMFEAPWIE

SEQ ID NO: 737 - protein, 9 aa, synthetic construct
YSGAKGHMM

SEQ ID NO: 738 - protein, 9 aa, synthetic construct
AAGASKNAK

SEQ ID NO: 739 - protein, 9 aa, synthetic construct
AAHRPMFTS

SEQ ID NO: 740 - protein, 9 aa, synthetic construct
AAKSFRRAA

SEQ ID NO: 741 - protein, 9 aa, synthetic construct
AARSTQGIA

SEQ ID NO: 742 - protein, 9 aa, synthetic construct
AATHKYRCN

SEQ ID NO: 743 - protein, 9 aa, synthetic construct
AATKEKRHM

SEQ ID NO: 744 - protein, 9 aa, synthetic construct
AAYTSRQLG

SEQ ID NO: 745 - protein, 9 aa, synthetic construct
ACKIKTGQA

SEQ ID NO: 746 - protein, 9 aa, synthetic construct
ACTKERSIR

SEQ ID NO: 747 - protein, 9 aa, synthetic construct
ADKTKKHFA

SEQ ID NO: 748 - protein, 9 aa, synthetic construct
AFKTMRWSM

SEQ ID NO: 749 - protein, 9 aa, synthetic construct
AFPPYKYRK

SEQ ID NO: 750 - protein, 9 aa, synthetic construct
AHRSKKTSM

SEQ ID NO: 751 - protein, 9 aa, synthetic construct
AIYSAMTAF

SEQ ID NO: 752 - protein, 9 aa, synthetic construct
AKAKMSRTY

SEQ ID NO: 753 - protein, 9 aa, synthetic construct
AKKASKRGC

SEQ ID NO: 754 - protein, 9 aa, synthetic construct
AKPIPQTKN

SEQ ID NO: 755 - protein, 9 aa, synthetic construct
ALRLKNSLT

SEQ ID NO: 756 - protein, 9 aa, synthetic construct
AMKMKKTHF

SEQ ID NO: 757 - protein, 9 aa, synthetic construct
AMSKAIRNS

SEQ ID NO: 758 - protein, 9 aa, synthetic construct
ANRFKNTEG

SEQ ID NO: 759 - protein, 9 aa, synthetic construct
AQKSLHYTC

SEQ ID NO: 760 - protein, 9 aa, synthetic construct
ASKPRKRYN

SEQ ID NO: 761 - protein, 9 aa, synthetic construct
ATFRDSDYQ

SEQ ID NO: 762 - protein, 9 aa, synthetic construct
ATHERRKSP

SEQ ID NO: 763 - protein, 9 aa, synthetic construct
ATTKRKGCC

SEQ ID NO: 764 - protein, 9 aa, synthetic construct
ATTRFPDAA

SEQ ID NO: 765 - protein, 9 aa, synthetic construct
AVRFGAAQK

SEQ ID NO: 766 - protein, 9 aa, synthetic construct
AVRLRSKVD

SEQ ID NO: 767 - protein, 9 aa, synthetic construct
AWIRCIQMP

SEQ ID NO: 768 - protein, 9 aa, synthetic construct
AYKQVKREL

SEQ ID NO: 769 - protein, 9 aa, synthetic construct
AYMVRLNHH

SEQ ID NO: 770 - protein, 9 aa, synthetic construct
AYMYRPATE

SEQ ID NO: 771 - protein, 9 aa, synthetic construct
CAKGKTQTS

SEQ ID NO: 772 - protein, 9 aa, synthetic construct
CASRKQRSH

SEQ ID NO: 773 - protein, 9 aa, synthetic construct
CGSSYKKVQ

SEQ ID NO: 774 - protein, 9 aa, synthetic construct
CIVQKTAQK

SEQ ID NO: 775 - protein, 9 aa, synthetic construct
CKCGLKRFS

SEQ ID NO: 776 - protein, 9 aa, synthetic construct
CKCLKTMKQ

SEQ ID NO: 777 - protein, 9 aa, synthetic construct
CKTRACKYC

SEQ ID NO: 778 - protein, 9 aa, synthetic construct
CRCKCAIKC

SEQ ID NO: 779 - protein, 9 aa, synthetic construct
CSKYTAKAW

SEQ ID NO: 780 - protein, 9 aa, synthetic construct
CSQGTKKSY

SEQ ID NO: 781 - protein, 9 aa, synthetic construct
CSTQGRKAM

SEQ ID NO: 782 - protein, 9 aa, synthetic construct
CSTSKKRTF

SEQ ID NO: 783 - protein, 9 aa, synthetic construct
CSTSQRRWG

SEQ ID NO: 784 - protein, 9 aa, synthetic construct
CTGPCCRPQ

SEQ ID NO: 785 - protein, 9 aa, synthetic construct
CTKHLARQH

SEQ ID NO: 786 - protein, 9 aa, synthetic construct
CTKKTRCQG

SEQ ID NO: 787 - protein, 9 aa, synthetic construct
CVDILLVHR

SEQ ID NO: 788 - protein, 9 aa, synthetic construct
CVGLDRRGY

SEQ ID NO: 789 - protein, 9 aa, synthetic construct
DAKFSRGMQ

SEQ ID NO: 790 - protein, 9 aa, synthetic construct
DAKFVRHQH

SEQ ID NO: 791 - protein, 9 aa, synthetic construct
DAKPSRCCL

SEQ ID NO: 792 - protein, 9 aa, synthetic construct
DAKSKKKWY

SEQ ID NO: 793 - protein, 9 aa, synthetic construct
DANIEWHGN

SEQ ID NO: 794 - protein, 9 aa, synthetic construct
DARKWSNCI

SEQ ID NO: 795 - protein, 9 aa, synthetic construct
DARMKGISS

SEQ ID NO: 796 - protein, 9 aa, synthetic construct
DASMWSGIE

SEQ ID NO: 797 - protein, 9 aa, synthetic construct
DDGKEVWHH

SEQ ID NO: 798 - protein, 9 aa, synthetic construct
DGFPKRKAC

SEQ ID NO: 799 - protein, 9 aa, synthetic construct
DGSSIRRYP

SEQ ID NO: 800 - protein, 9 aa, synthetic construct
DHFHPRQSP

SEQ ID NO: 801 - protein, 9 aa, synthetic construct
DIARGKGKP

SEQ ID NO: 802 - protein, 9 aa, synthetic construct
DIKMHRGAC

SEQ ID NO: 803 - protein, 9 aa, synthetic construct
DKKDRKMIY

SEQ ID NO: 804 - protein, 9 aa, synthetic construct
DKKGYALAY

SEQ ID NO: 805 - protein, 9 aa, synthetic construct
DKKQRQWTA

SEQ ID NO: 806 - protein, 9 aa, synthetic construct
DMQRKKREG

SEQ ID NO: 807 - protein, 9 aa, synthetic construct
DQKFMKTYF

SEQ ID NO: 808 - protein, 9 aa, synthetic construct
DRLPSRQCQ

SEQ ID NO: 809 - protein, 9 aa, synthetic construct
DRRGKTSMP

SEQ ID NO: 810 - protein, 9 aa, synthetic construct
DRRGYGVSN

SEQ ID NO: 811 - protein, 9 aa, synthetic construct
DSQKPKKAP

SEQ ID NO: 812 - protein, 9 aa, synthetic construct
DSRCFRRGY

SEQ ID NO: 813 - protein, 9 aa, synthetic construct
DSRNRAHWC

SEQ ID NO: 814 - protein, 9 aa, synthetic construct
DSSRARYKS

SEQ ID NO: 815 - protein, 9 aa, synthetic construct
DTKQKGSPK

SEQ ID NO: 816 - protein, 9 aa, synthetic construct
DTSRVKAAQ

SEQ ID NO: 817 - protein, 9 aa, synthetic construct
DVKLKKRYY

SEQ ID NO: 818 - protein, 9 aa, synthetic construct
DVKPRRSGF

SEQ ID NO: 819 - protein, 9 aa, synthetic construct
DVRTSRGVT

SEQ ID NO: 820 - protein, 9 aa, synthetic construct
DVRWIRHHH

SEQ ID NO: 821 - protein, 9 aa, synthetic construct
DYHRLGRQE

SEQ ID NO: 822 - protein, 9 aa, synthetic construct
EAKLAKSYS

SEQ ID NO: 823 - protein, 9 aa, synthetic construct
EAKYKKNYS

SEQ ID NO: 824 - protein, 9 aa, synthetic construct
EARGRAHSG

SEQ ID NO: 825 - protein, 9 aa, synthetic construct
EARTSRWLA

SEQ ID NO: 826 - protein, 9 aa, synthetic construct
ECKPKAKWM

SEQ ID NO: 827 - protein, 9 aa, synthetic construct
ECKPRRMQA

SEQ ID NO: 828 - protein, 9 aa, synthetic construct
ECRPTRINE

SEQ ID NO: 829 - protein, 9 aa, synthetic construct
EFKHRWQGR

SEQ ID NO: 830 - protein, 9 aa, synthetic construct
EGKLTKRCM

SEQ ID NO: 831 - protein, 9 aa, synthetic construct
EIFKALRAE

SEQ ID NO: 832 - protein, 9 aa, synthetic construct
EIRPCRFRN

SEQ ID NO: 833 - protein, 9 aa, synthetic construct
EIRRQGQAI

SEQ ID NO: 834 - protein, 9 aa, synthetic construct
EIRVIKSHS

SEQ ID NO: 835 - protein, 9 aa, synthetic construct
EKHTFKKWA

SEQ ID NO: 836 - protein, 9 aa, synthetic construct
EKKEAKKFN

SEQ ID NO: 837 - protein, 9 aa, synthetic construct
EKKHKGEFW

SEQ ID NO: 838 - protein, 9 aa, synthetic construct
EKRSISVHT

SEQ ID NO: 839 - protein, 9 aa, synthetic construct
EMKVTKMRG

SEQ ID NO: 840 - protein, 9 aa, synthetic construct
ENKLVKKTP

SEQ ID NO: 841 - protein, 9 aa, synthetic construct
EQQCFLHGN

SEQ ID NO: 842 - protein, 9 aa, synthetic construct
EQRIMRSQA

SEQ ID NO: 843 - protein, 9 aa, synthetic construct
ERFHKMSAD

SEQ ID NO: 844 - protein, 9 aa, synthetic construct
ERKARSTYC

SEQ ID NO: 845 - protein, 9 aa, synthetic construct
ERQQRCRFS

SEQ ID NO: 846 - protein, 9 aa, synthetic construct
ERVPMWRNA

SEQ ID NO: 847 - protein, 9 aa, synthetic construct
ERYPQRSAF

SEQ ID NO: 848 - protein, 9 aa, synthetic construct
ESGCNQPQD

SEQ ID NO: 849 - protein, 9 aa, synthetic construct
ESGRKSRAE

SEQ ID NO: 850 - protein, 9 aa, synthetic construct
ESIRAKRVA

SEQ ID NO: 851 - protein, 9 aa, synthetic construct
ESKGYRSGC

SEQ ID NO: 852 - protein, 9 aa, synthetic construct
ESKIKSAAS

SEQ ID NO: 853 - protein, 9 aa, synthetic construct
ESKNVKDWK

SEQ ID NO: 854 - protein, 9 aa, synthetic construct
ESKYRNRMC

SEQ ID NO: 855 - protein, 9 aa, synthetic construct
ETHRKNQHN

SEQ ID NO: 856 - protein, 9 aa, synthetic construct
ETIPFLDLG

SEQ ID NO: 857 - protein, 9 aa, synthetic construct
ETKYVRKEW

SEQ ID NO: 858 - protein, 9 aa, synthetic construct
ETRMRANFQ

SEQ ID NO: 859 - protein, 9 aa, synthetic construct
ETRPFRGNE

SEQ ID NO: 860 - protein, 9 aa, synthetic construct
ETRSRCHCA

SEQ ID NO: 861 - protein, 9 aa, synthetic construct
ETRVSRNMP

SEQ ID NO: 862 - protein, 9 aa, synthetic construct
ETRYFKNAY

SEQ ID NO: 863 - protein, 9 aa, synthetic construct
ETVERCNFI

SEQ ID NO: 864 - protein, 9 aa, synthetic construct
ETVRQKGHN

SEQ ID NO: 865 - protein, 9 aa, synthetic construct
EVGNRKWQS

SEQ ID NO: 866 - protein, 9 aa, synthetic construct
EVKRAPSTL

SEQ ID NO: 867 - protein, 9 aa, synthetic construct
EVKWRKCLQ

SEQ ID NO: 868 - protein, 9 aa, synthetic construct
EVLRPRAIA

SEQ ID NO: 869 - protein, 9 aa, synthetic construct
EVRALRTQH

SEQ ID NO: 870 - protein, 9 aa, synthetic construct
EVRMSRTIN

SEQ ID NO: 871 - protein, 9 aa, synthetic construct
EVRQSRQVC

SEQ ID NO: 872 - protein, 9 aa, synthetic construct
EVRSARQQS

SEQ ID NO: 873 - protein, 9 aa, synthetic construct
EVTRHRLWS

SEQ ID NO: 874 - protein, 9 aa, synthetic construct
EWHRFGRNS

SEQ ID NO: 875 - protein, 9 aa, synthetic construct
EWWPIRHSW

SEQ ID NO: 876 - protein, 9 aa, synthetic construct
EYKPCRRAV

SEQ ID NO: 877 - protein, 9 aa, synthetic construct
EYKTARHAM

SEQ ID NO: 878 - protein, 9 aa, synthetic construct
FAYKEWLPG

SEQ ID NO: 879 - protein, 9 aa, synthetic construct
FFHSRMSQE

SEQ ID NO: 880 - protein, 9 aa, synthetic construct
FHRALFHAG

SEQ ID NO: 881 - protein, 9 aa, synthetic construct
FICMKKTDQ

SEQ ID NO: 882 - protein, 9 aa, synthetic construct
FIGWMHRAN

SEQ ID NO: 883 - protein, 9 aa, synthetic construct
FIWPIDHTS

SEQ ID NO: 884 - protein, 9 aa, synthetic construct
FLNEYGYYQ

SEQ ID NO: 885 - protein, 9 aa, synthetic construct
FSFQYLKKG

SEQ ID NO: 886 - protein, 9 aa, synthetic construct
FTATSLRFP

SEQ ID NO: 887 - protein, 9 aa, synthetic construct
GAGMKKRMS

SEQ ID NO: 888 - protein, 9 aa, synthetic construct
GAKLKSRLD

SEQ ID NO: 889 - protein, 9 aa, synthetic construct
GDKSRKSKM

SEQ ID NO: 890 - protein, 9 aa, synthetic construct
GFSMMMIPW

SEQ ID NO: 891 - protein, 9 aa, synthetic construct
GHKETRAMG

SEQ ID NO: 892 - protein, 9 aa, synthetic construct
GILRKVNDH

SEQ ID NO: 893 - protein, 9 aa, synthetic construct
GNVKIMRFA

SEQ ID NO: 894 - protein, 9 aa, synthetic construct
GQKTTSTNY

SEQ ID NO: 895 - protein, 9 aa, synthetic construct
GSKMYAHTP

SEQ ID NO: 896 - protein, 9 aa, synthetic construct
GSRDTRQYP

SEQ ID NO: 897 - protein, 9 aa, synthetic construct
GTHLELMNA

SEQ ID NO: 898 - protein, 9 aa, synthetic construct
GTKQKAVIE

SEQ ID NO: 899 - protein, 9 aa, synthetic construct
GTREHGKTP

SEQ ID NO: 900 - protein, 9 aa, synthetic construct
GTWSAMRAT

SEQ ID NO: 901 - protein, 9 aa, synthetic construct
GVKCQKSAK

SEQ ID NO: 902 - protein, 9 aa, synthetic construct
GVKGHSHDR

SEQ ID NO: 903 - protein, 9 aa, synthetic construct
GVWPCYYLQ

SEQ ID NO: 904 - protein, 9 aa, synthetic construct
GYMECDHMQ

SEQ ID NO: 905 - protein, 9 aa, synthetic construct
GYRFVGTTP

SEQ ID NO: 906 - protein, 9 aa, synthetic construct
HAMIFQRAS

SEQ ID NO: 907 - protein, 9 aa, synthetic construct
HAPMYKSAG

SEQ ID NO: 908 - protein, 9 aa, synthetic construct
HNKDLKCQE

SEQ ID NO: 909 - protein, 9 aa, synthetic construct
HRRMRDAIY

SEQ ID NO: 910 - protein, 9 aa, synthetic construct
HSQRCKVIA

SEQ ID NO: 911 - protein, 9 aa, synthetic construct
IAKGQQQMC

SEQ ID NO: 912 - protein, 9 aa, synthetic construct
IAKQKCNCC

SEQ ID NO: 913 - protein, 9 aa, synthetic construct
IAMRKWNCE

SEQ ID NO: 914 - protein, 9 aa, synthetic construct
IANQLTMTT

SEQ ID NO: 915 - protein, 9 aa, synthetic construct
IASILWSSA

SEQ ID NO: 916 - protein, 9 aa, synthetic construct
IAVRYYHQW

SEQ ID NO: 917 - protein, 9 aa, synthetic construct
ICKPKGKWL

SEQ ID NO: 918 - protein, 9 aa, synthetic construct
IERKNNASQ

SEQ ID NO: 919 - protein, 9 aa, synthetic construct
IFRLWNAKE

SEQ ID NO: 920 - protein, 9 aa, synthetic construct
IGGPYRTIN

SEQ ID NO: 921 - protein, 9 aa, synthetic construct
IGKYTKKMT

SEQ ID NO: 922 - protein, 9 aa, synthetic construct
IGRFNNIAE

SEQ ID NO: 923 - protein, 9 aa, synthetic construct
IIRPSSHAC

SEQ ID NO: 924 - protein, 9 aa, synthetic construct
IIRSGTKYP

SEQ ID NO: 925 - protein, 9 aa, synthetic construct
IMRGGTKYG

SEQ ID NO: 926 - protein, 9 aa, synthetic construct
INKTVQRCG

SEQ ID NO: 927 - protein, 9 aa, synthetic construct
INRPTRWPH

SEQ ID NO: 928 - protein, 9 aa, synthetic construct
INVRSQHQH

SEQ ID NO: 929 - protein, 9 aa, synthetic construct
ISNISKWRT

SEQ ID NO: 930 - protein, 9 aa, synthetic construct
ISQSMKFSG

SEQ ID NO: 931 - protein, 9 aa, synthetic construct
ISRDQKHVC

SEQ ID NO: 932 - protein, 9 aa, synthetic construct
ITFPRIRAD

SEQ ID NO: 933 - protein, 9 aa, synthetic construct
KAHAITDHS

SEQ ID NO: 934 - protein, 9 aa, synthetic construct
KGMRCKAME

SEQ ID NO: 935 - protein, 9 aa, synthetic construct
KHLMVPGKM

SEQ ID NO: 936 - protein, 9 aa, synthetic construct
KKMGRMCDR

SEQ ID NO: 937 - protein, 9 aa, synthetic construct
KMHRCKDDR

SEQ ID NO: 938 - protein, 9 aa, synthetic construct
KNEVDTNGE

SEQ ID NO: 939 - protein, 9 aa, synthetic construct
KSAVHQGGH

SEQ ID NO: 940 - protein, 9 aa, synthetic construct
KSDTFRRVF

SEQ ID NO: 941 - protein, 9 aa, synthetic construct
KTHKFSSCL

SEQ ID NO: 942 - protein, 9 aa, synthetic construct
KVRSNREQM

SEQ ID NO: 943 - protein, 9 aa, synthetic construct
KWQGSTHKT

SEQ ID NO: 944 - protein, 9 aa, synthetic construct
KWTYNNTDL

SEQ ID NO: 945 - protein, 9 aa, synthetic construct
LAGKMAHWQ

SEQ ID NO: 946 - protein, 9 aa, synthetic construct
LAYMKILQQ

SEQ ID NO: 947 - protein, 9 aa, synthetic construct
LCNIRCRSG

SEQ ID NO: 948 - protein, 9 aa, synthetic construct
LDAQIVCYG

SEQ ID NO: 949 - protein, 9 aa, synthetic construct
LFKAAVKAP

SEQ ID NO: 950 - protein, 9 aa, synthetic construct
LFKPKKTSQ

SEQ ID NO: 951 - protein, 9 aa, synthetic construct
LGKFSGAGS

SEQ ID NO: 952 - protein, 9 aa, synthetic construct
LHKQYYHGM

SEQ ID NO: 953 - protein, 9 aa, synthetic construct
LHWLIKESG

SEQ ID NO: 954 - protein, 9 aa, synthetic construct
LKERKEVRA

SEQ ID NO: 955 - protein, 9 aa, synthetic construct
LKGSSKSSF

SEQ ID NO: 956 - protein, 9 aa, synthetic construct
LLWINTMIW

SEQ ID NO: 957 - protein, 9 aa, synthetic construct
LMFYTLSRD

SEQ ID NO: 958 - protein, 9 aa, synthetic construct
LMRNVNVEP

SEQ ID NO: 959 - protein, 9 aa, synthetic construct
LNRQHGHAP

SEQ ID NO: 960 - protein, 9 aa, synthetic construct
LNRYVSMGV

SEQ ID NO: 961 - protein, 9 aa, synthetic construct
LPKVARKMF

SEQ ID NO: 962 - protein, 9 aa, synthetic construct
LQGRYMGAQ

SEQ ID NO: 963 - protein, 9 aa, synthetic construct
LQKNGRYSG

SEQ ID NO: 964 - protein, 9 aa, synthetic construct
LSIRRNCCG

SEQ ID NO: 965 - protein, 9 aa, synthetic construct
LSRHTKQLA

SEQ ID NO: 966 - protein, 9 aa, synthetic construct
LSRPTMTIS

SEQ ID NO: 967 - protein, 9 aa, synthetic construct
LTAKPFKCQ

SEQ ID NO: 968 - protein, 9 aa, synthetic construct
LTGKYVGYS

SEQ ID NO: 969 - protein, 9 aa, synthetic construct
LTKSRGQCS

SEQ ID NO: 970 - protein, 9 aa, synthetic construct
LTRAHRSHE

SEQ ID NO: 971 - protein, 9 aa, synthetic construct
LVIGRHQNW

SEQ ID NO: 972 - protein, 9 aa, synthetic construct
LVRDIREFS

SEQ ID NO: 973 - protein, 9 aa, synthetic construct
LVRYKSGGD

SEQ ID NO: 974 - protein, 9 aa, synthetic construct
LVYTSLKDA

SEQ ID NO: 975 - protein, 9 aa, synthetic construct
MAKQKKQAM

SEQ ID NO: 976 - protein, 9 aa, synthetic construct
MAMEQRRFG

SEQ ID NO: 977 - protein, 9 aa, synthetic construct
MAMREMKVC

SEQ ID NO: 978 - protein, 9 aa, synthetic construct
MAMYYRMDD

SEQ ID NO: 979 - protein, 9 aa, synthetic construct
MCRDRGKMV

SEQ ID NO: 980 - protein, 9 aa, synthetic construct
MDGRFKATS

SEQ ID NO: 981 - protein, 9 aa, synthetic construct
MEGCFMYVF

SEQ ID NO: 982 - protein, 9 aa, synthetic construct
MGWPKHQDP

SEQ ID NO: 983 - protein, 9 aa, synthetic construct
MHKVKSGNA

SEQ ID NO: 984 - protein, 9 aa, synthetic construct
MIKNSGKEL

SEQ ID NO: 985 - protein, 9 aa, synthetic construct
MIRGQRGGG

SEQ ID NO: 986 - protein, 9 aa, synthetic construct
MIWPMSVQH

SEQ ID NO: 987 - protein, 9 aa, synthetic construct
MLKMGFRYA

SEQ ID NO: 988 - protein, 9 aa, synthetic construct
MLKYRQGGG

SEQ ID NO: 989 - protein, 9 aa, synthetic construct
MLTYWTSRN

SEQ ID NO: 990 - protein, 9 aa, synthetic construct
MMKCKRWDY

SEQ ID NO: 991 - protein, 9 aa, synthetic construct
MMKSHKAGN

SEQ ID NO: 992 - protein, 9 aa, synthetic construct
MNKDKRIMP

SEQ ID NO: 993 - protein, 9 aa, synthetic construct
MNVQKRNYF

SEQ ID NO: 994 - protein, 9 aa, synthetic construct
MPKLNRKAQ

SEQ ID NO: 995 - protein, 9 aa, synthetic construct
MPKNYGHAP

SEQ ID NO: 996 - protein, 9 aa, synthetic construct
MPMIKLSYS

SEQ ID NO: 997 - protein, 9 aa, synthetic construct
MQAQPRKQG

SEQ ID NO: 998 - protein, 9 aa, synthetic construct
MQHYLHHAT

SEQ ID NO: 999 - protein, 9 aa, synthetic construct
MQRYKSKCC

SEQ ID NO: 1000 - protein, 9 aa, synthetic construct
MQYMQRNAY

SEQ ID NO: 1001 - protein, 9 aa, synthetic construct
MSKESRSQP

SEQ ID NO: 1002 - protein, 9 aa, synthetic construct
MSLGQRTSW

SEQ ID NO: 1003 - protein, 9 aa, synthetic construct
MSMVRKDQQ

SEQ ID NO: 1004 - protein, 9 aa, synthetic construct
MTAGKKAWN

SEQ ID NO: 1005 - protein, 9 aa, synthetic construct
MTTLQRQFM

SEQ ID NO: 1006 - protein, 9 aa, synthetic construct
MVIPVEIMI

SEQ ID NO: 1007 - protein, 9 aa, synthetic construct
MVKMKCTCT

SEQ ID NO: 1008 - protein, 9 aa, synthetic construct
MVWPITRTD

SEQ ID NO: 1009 - protein, 9 aa, synthetic construct
MVWPKQTEA

SEQ ID NO: 1010 - protein, 9 aa, synthetic construct
MVWWEEKMC

SEQ ID NO: 1011 - protein, 9 aa, synthetic construct
MVYRPLTSS

SEQ ID NO: 1012 - protein, 9 aa, synthetic construct
MWAGKSRWC

SEQ ID NO: 1013 - protein, 9 aa, synthetic construct
MWAPFRHWN

SEQ ID NO: 1014 - protein, 9 aa, synthetic construct
MWAQTRQQW

SEQ ID NO: 1015 - protein, 9 aa, synthetic construct
MYWHQTLSE

SEQ ID NO: 1016 - protein, 9 aa, synthetic construct
NAKLNKRQM

SEQ ID NO: 1017 - protein, 9 aa, synthetic construct
NHKSYPVAP

SEQ ID NO: 1018 - protein, 9 aa, synthetic construct
NKHSTRAMD

SEQ ID NO: 1019 - protein, 9 aa, synthetic construct
NRHKCGSWS

SEQ ID NO: 1020 - protein, 9 aa, synthetic construct
NSGLKKYYG

SEQ ID NO: 1021 - protein, 9 aa, synthetic construct
NSRNMLQNE

SEQ ID NO: 1022 - protein, 9 aa, synthetic construct
NTKIRSVQH

SEQ ID NO: 1023 - protein, 9 aa, synthetic construct
NTKSKSQLA

SEQ ID NO: 1024 - protein, 9 aa, synthetic construct
NTVRTFHGW

SEQ ID NO: 1025 - protein, 9 aa, synthetic construct
NVHAKLSAE

SEQ ID NO: 1026 - protein, 9 aa, synthetic construct
NVKPTAWKW

SEQ ID NO: 1027 - protein, 9 aa, synthetic construct
NYRSHRKIA

SEQ ID NO: 1028 - protein, 9 aa, synthetic construct
PAVKKVERQ

SEQ ID NO: 1029 - protein, 9 aa, synthetic construct
PCKLAGTWD

SEQ ID NO: 1030 - protein, 9 aa, synthetic construct
PIGKHAFKC

SEQ ID NO: 1031 - protein, 9 aa, synthetic construct
PLVKSGFGT

SEQ ID NO: 1032 - protein, 9 aa, synthetic construct
PQEKRKNVA

SEQ ID NO: 1033 - protein, 9 aa, synthetic construct
PQFTYRKYP

SEQ ID NO: 1034 - protein, 9 aa, synthetic construct
QAAFHLKNA

SEQ ID NO: 1035 - protein, 9 aa, synthetic construct
QATTKRTIF

SEQ ID NO: 1036 - protein, 9 aa, synthetic construct
QCNVRTKMF

SEQ ID NO: 1037 - protein, 9 aa, synthetic construct
QDFRLSSGM

SEQ ID NO: 1038 - protein, 9 aa, synthetic construct
QEKCNRRGC

SEQ ID NO: 1039 - protein, 9 aa, synthetic construct
QFAKQVKWF

SEQ ID NO: 1040 - protein, 9 aa, synthetic construct
QGFMVMKAV

SEQ ID NO: 1041 - protein, 9 aa, synthetic construct
QGKVKERTM

SEQ ID NO: 1042 - protein, 9 aa, synthetic construct
QGRQVLGRE

SEQ ID NO: 1043 - protein, 9 aa, synthetic construct
QILIKDCFS

SEQ ID NO: 1044 - protein, 9 aa, synthetic construct
QKQKRTRAQ

SEQ ID NO: 1045 - protein, 9 aa, synthetic construct
QMSGRCTCR

SEQ ID NO: 1046 - protein, 9 aa, synthetic construct
QNRAIRSYT

SEQ ID NO: 1047 - protein, 9 aa, synthetic construct
QPKFFYRSA

SEQ ID NO: 1048 - protein, 9 aa, synthetic construct
QQLDATHER

SEQ ID NO: 1049 - protein, 9 aa, synthetic construct
QQTKRSCMA

SEQ ID NO: 1050 - protein, 9 aa, synthetic construct
QRKDKQTQH

SEQ ID NO: 1051 - protein, 9 aa, synthetic construct
QSFRFWKHH

SEQ ID NO: 1052 - protein, 9 aa, synthetic construct
QSKFKIPYC

SEQ ID NO: 1053 - protein, 9 aa, synthetic construct
QSKLRLTEP

SEQ ID NO: 1054 - protein, 9 aa, synthetic construct
QSQSTKAVW

SEQ ID NO: 1055 - protein, 9 aa, synthetic construct
QSRQTGKFW

SEQ ID NO: 1056 - protein, 9 aa, synthetic construct
QTCRKDRHF

SEQ ID NO: 1057 - protein, 9 aa, synthetic construct
QTMKQIRAT

SEQ ID NO: 1058 - protein, 9 aa, synthetic construct
QTRISRWDG

SEQ ID NO: 1059 - protein, 9 aa, synthetic construct
QVFLKIRQE

SEQ ID NO: 1060 - protein, 9 aa, synthetic construct
QVHNRLTQL

SEQ ID NO: 1061 - protein, 9 aa, synthetic construct
QVHPSRWIR

SEQ ID NO: 1062 - protein, 9 aa, synthetic construct
QVKMGKPNH

SEQ ID NO: 1063 - protein, 9 aa, synthetic construct
QVMRQNTIT

SEQ ID NO: 1064 - protein, 9 aa, synthetic construct
QYTRFNHVP

SEQ ID NO: 1065 - protein, 9 aa, synthetic construct
RFKVWTCSC

SEQ ID NO: 1066 - protein, 9 aa, synthetic construct
RFYDAMQMH

SEQ ID NO: 1067 - protein, 9 aa, synthetic construct
RHDKQANGS

SEQ ID NO: 1068 - protein, 9 aa, synthetic construct
RKNPTTCYS

SEQ ID NO: 1069 - protein, 9 aa, synthetic construct
RKPHSGWRC

SEQ ID NO: 1070 - protein, 9 aa, synthetic construct
RKRFTSMDP

SEQ ID NO: 1071 - protein, 9 aa, synthetic construct
RLEDVHGNK

SEQ ID NO: 1072 - protein, 9 aa, synthetic construct
RNKEWTGKG

SEQ ID NO: 1073 - protein, 9 aa, synthetic construct
RQLPMNCCE

SEQ ID NO: 1074 - protein, 9 aa, synthetic construct
RVNPELHMG

SEQ ID NO: 1075 - protein, 9 aa, synthetic construct
SAKMQQISL

SEQ ID NO: 1076 - protein, 9 aa, synthetic construct
SARDYREIA

SEQ ID NO: 1077 - protein, 9 aa, synthetic construct
SARISAIGP

SEQ ID NO: 1078 - protein, 9 aa, synthetic construct
SCKFKKSFF

SEQ ID NO: 1079 - protein, 9 aa, synthetic construct
SCKHVVKVP

SEQ ID NO: 1080 - protein, 9 aa, synthetic construct
SFIRTHRSW

SEQ ID NO: 1081 - protein, 9 aa, synthetic construct
SFKMMTRQA

SEQ ID NO: 1082 - protein, 9 aa, synthetic construct
SFKQKAREY

SEQ ID NO: 1083 - protein, 9 aa, synthetic construct
SFRPTTWKQ

SEQ ID NO: 1084 - protein, 9 aa, synthetic construct
SGSHYRRFP

SEQ ID NO: 1085 - protein, 9 aa, synthetic construct
SHKFTGRCG

SEQ ID NO: 1086 - protein, 9 aa, synthetic construct
SLNQFVMHE

SEQ ID NO: 1087 - protein, 9 aa, synthetic construct
SQKHHTRSH

SEQ ID NO: 1088 - protein, 9 aa, synthetic construct
SQKIVHYTN

SEQ ID NO: 1089 - protein, 9 aa, synthetic construct
SSAQWLACD

SEQ ID NO: 1090 - protein, 9 aa, synthetic construct
SSKFMACAS

SEQ ID NO: 1091 - protein, 9 aa, synthetic construct
SSKLVSKTW

SEQ ID NO: 1092 - protein, 9 aa, synthetic construct
SSRFLCHNE

SEQ ID NO: 1093 - protein, 9 aa, synthetic construct
STKAWRYTG

SEQ ID NO: 1094 - protein, 9 aa, synthetic construct
STKQAKRTA

SEQ ID NO: 1095 - protein, 9 aa, synthetic construct
STTHLLRYP

SEQ ID NO: 1096 - protein, 9 aa, synthetic construct
SVKLIGSEW

SEQ ID NO: 1097 - protein, 9 aa, synthetic construct
SVVWPAQVE

SEQ ID NO: 1098 - protein, 9 aa, synthetic construct
SWGYCMLDQ

SEQ ID NO: 1099 - protein, 9 aa, synthetic construct
SWHMKMIAG

SEQ ID NO: 1100 - protein, 9 aa, synthetic construct
SWKGMGKAD

SEQ ID NO: 1101 - protein, 9 aa, synthetic construct
TAKITGSGS

SEQ ID NO: 1102 - protein, 9 aa, synthetic construct
TAVRWMNGR

SEQ ID NO: 1103 - protein, 9 aa, synthetic construct
TEYTRKKVP

SEQ ID NO: 1104 - protein, 9 aa, synthetic construct
TGKSKSRMV

SEQ ID NO: 1105 - protein, 9 aa, synthetic construct
TGKSKTWMP

SEQ ID NO: 1106 - protein, 9 aa, synthetic construct
TGMRMPHGG

SEQ ID NO: 1107 - protein, 9 aa, synthetic construct
TGTLTRWGP

SEQ ID NO: 1108 - protein, 9 aa, synthetic construct
THFRKNWES

SEQ ID NO: 1109 - protein, 9 aa, synthetic construct
TIANSRSHM

SEQ ID NO: 1110 - protein, 9 aa, synthetic construct
TIKLSRFEP

SEQ ID NO: 1111 - protein, 9 aa, synthetic construct
TIKVGHSRC

SEQ ID NO: 1112 - protein, 9 aa, synthetic construct
TIWQRSGVD

SEQ ID NO: 1113 - protein, 9 aa, synthetic construct
TKAIHNQSI

SEQ ID NO: 1114 - protein, 9 aa, synthetic construct
TLKAYNHQI

SEQ ID NO: 1115 - protein, 9 aa, synthetic construct
TMGFKTRYQ

SEQ ID NO: 1116 - protein, 9 aa, synthetic construct
TMRGQPFGV

SEQ ID NO: 1117 - protein, 9 aa, synthetic construct
TPDKRKWAQ

SEQ ID NO: 1118 - protein, 9 aa, synthetic construct
TPILAGLVY

SEQ ID NO: 1119 - protein, 9 aa, synthetic construct
TPKCIKWQQ

SEQ ID NO: 1120 - protein, 9 aa, synthetic construct
TPRFHNKVP

SEQ ID NO: 1121 - protein, 9 aa, synthetic construct
TPRSTRFCA

SEQ ID NO: 1122 - protein, 9 aa, synthetic construct
TQHSLKAMM

SEQ ID NO: 1123 - protein, 9 aa, synthetic construct
TSGWYKKSY

SEQ ID NO: 1124 - protein, 9 aa, synthetic construct
TSKVKMWEY

SEQ ID NO: 1125 - protein, 9 aa, synthetic construct
TSKVRSKCP

SEQ ID NO: 1126 - protein, 9 aa, synthetic construct
TSVPHKWKR

SEQ ID NO: 1127 - protein, 9 aa, synthetic construct
TTHLKLAAA

SEQ ID NO: 1128 - protein, 9 aa, synthetic construct
TTKDGRAFE

SEQ ID NO: 1129 - protein, 9 aa, synthetic construct
TTKEKKKDW

SEQ ID NO: 1130 - protein, 9 aa, synthetic construct
TTKMGKWAA

SEQ ID NO: 1131 - protein, 9 aa, synthetic construct
TTKPYQSIR

SEQ ID NO: 1132 - protein, 9 aa, synthetic construct
TTKSRGFIP

SEQ ID NO: 1133 - protein, 9 aa, synthetic construct
TTLRRHCCC

SEQ ID NO: 1134 - protein, 9 aa, synthetic construct
TTLRTIKQA

SEQ ID NO: 1135 - protein, 9 aa, synthetic construct
TTRTNSICS

SEQ ID NO: 1136 - protein, 9 aa, synthetic construct
TVFYRHHHL

SEQ ID NO: 1137 - protein, 9 aa, synthetic construct
TVGLGRRGA

SEQ ID NO: 1138 - protein, 9 aa, synthetic construct
TVKSHTPMA

SEQ ID NO: 1139 - protein, 9 aa, synthetic construct
TVKSREHSM

SEQ ID NO: 1140 - protein, 9 aa, synthetic construct
TVLNYRRGF

SEQ ID NO: 1141 - protein, 9 aa, synthetic construct
TVNVNKKAY

SEQ ID NO: 1142 - protein, 9 aa, synthetic construct
TVRLQSYAQ

SEQ ID NO: 1143 - protein, 9 aa, synthetic construct
TVRTLFKGN

SEQ ID NO: 1144 - protein, 9 aa, synthetic construct
TVVAKTLRA

SEQ ID NO: 1145 - protein, 9 aa, synthetic construct
TWRFNNHLC

SEQ ID NO: 1146 - protein, 9 aa, synthetic construct
TYFKVMKDS

SEQ ID NO: 1147 - protein, 9 aa, synthetic construct
VARPNVHQE

SEQ ID NO: 1148 - protein, 9 aa, synthetic construct
VASSPRVCP

SEQ ID NO: 1149 - protein, 9 aa, synthetic construct
VCVGRRAER

SEQ ID NO: 1150 - protein, 9 aa, synthetic construct
VFKQFGKRE

SEQ ID NO: 1151 - protein, 9 aa, synthetic construct
VGTSARKIG

SEQ ID NO: 1152 - protein, 9 aa, synthetic construct
VLAPYRNCE

SEQ ID NO: 1153 - protein, 9 aa, synthetic construct
VMVKRLATG

SEQ ID NO: 1154 - protein, 9 aa, synthetic construct
VRQRPKFRP

SEQ ID NO: 1155 - protein, 9 aa, synthetic construct
VSRTRIDSH

SEQ ID NO: 1156 - protein, 9 aa, synthetic construct
VTKPKTVAD

SEQ ID NO: 1157 - protein, 9 aa, synthetic construct
VTKWKNSGG

SEQ ID NO: 1158 - protein, 9 aa, synthetic construct
VTMSRRSVW

SEQ ID NO: 1159 - protein, 9 aa, synthetic construct
VTRSCCSFG

SEQ ID NO: 1160 - protein, 9 aa, synthetic construct
VVKGMVCPC

SEQ ID NO: 1161 - protein, 9 aa, synthetic construct
VVMQNNVAE

SEQ ID NO: 1162 - protein, 9 aa, synthetic construct
WIEYISWWG

SEQ ID NO: 1163 - protein, 9 aa, synthetic construct
YNFPKSAAE

SEQ ID NO: 1164 - protein, 9 aa, synthetic construct
YNKSYRETG

SEQ ID NO: 1165 - protein, 9 aa, synthetic construct
YPKPTRRDC

SEQ ID NO: 1166 - protein, 9 aa, synthetic construct
YQKPSQTWS

SEQ ID NO: 1167 - protein, 9 aa, synthetic construct
YSNLKSKAQ

SEQ ID NO: 1168 - protein, 9 aa, synthetic construct
YTRGCHGCS

SEQ ID NO: 1169 - protein, 9 aa, synthetic construct
YVSYARQSV

SEQ ID NO: 1170 - protein, 9 aa, synthetic construct
KSRKVKCLK

SEQ ID NO: 1171 - protein, 9 aa, synthetic construct
KKKYKGHIP

SEQ ID NO: 1172 - protein, 9 aa, synthetic construct
KKRKKILFM

SEQ ID NO: 1173 - protein, 9 aa, synthetic construct
KTKCTKTKN

SEQ ID NO: 1174 - protein, 9 aa, synthetic construct
KRKKAKVIE

SEQ ID NO: 1175 - protein, 9 aa, synthetic construct
KQKIKKTAF

SEQ ID NO: 1176 - protein, 9 aa, synthetic construct
KKCGKKRHY

SEQ ID NO: 1177 - protein, 9 aa, synthetic construct
LCKNKKMKN

SEQ ID NO: 1178 - protein, 9 aa, synthetic construct
KKKRKGQCP

SEQ ID NO: 1179 - protein, 9 aa, synthetic construct
KQKTKHWMK

SEQ ID NO: 1180 - protein, 9 aa, synthetic construct
CSRKAKFKK

SEQ ID NO: 1181 - protein, 9 aa, synthetic construct
KAKNKACKK

SEQ ID NO: 1182 - protein, 9 aa, synthetic construct
AKKKTLITK

SEQ ID NO: 1183 - protein, 9 aa, synthetic construct
RKKKGKPSA

SEQ ID NO: 1184 - protein, 9 aa, synthetic construct
HRRRAQYRS

SEQ ID NO: 1185 - protein, 9 aa, synthetic construct
KGKKIKLMM

SEQ ID NO: 1186 - protein, 9 aa, synthetic construct
TKKPCKYKS

SEQ ID NO: 1187 - protein, 9 aa, synthetic construct
KKKTKTQIP

SEQ ID NO: 1188 - protein, 9 aa, synthetic construct
KKTKGKSGT

SEQ ID NO: 1189 - protein, 9 aa, synthetic construct
CRRRRKIHE

SEQ ID NO: 1190 - protein, 9 aa, synthetic construct
IKTRKKWKY

SEQ ID NO: 1191 - protein, 9 aa, synthetic construct
KAKFKKWAS

SEQ ID NO: 1192 - protein, 9 aa, synthetic construct
KCRKKVKVA

SEQ ID NO: 1193 - protein, 9 aa, synthetic construct
KKSVKKALV

SEQ ID NO: 1194 - protein, 9 aa, synthetic construct
KSRKKQVKH

SEQ ID NO: 1195 - protein, 9 aa, synthetic construct
YMKKHKKGQ

SEQ ID NO: 1196 - protein, 9 aa, synthetic construct
KKTLKKWLP

SEQ ID NO: 1197 - protein, 9 aa, synthetic construct
RRRRASCAE

SEQ ID NO: 1198 - protein, 9 aa, synthetic construct
KGKKRKTAM

SEQ ID NO: 1199 - protein, 9 aa, synthetic construct
KQKKKQNHQ

SEQ ID NO: 1200 - protein, 9 aa, synthetic construct
KKYNKKGMW

SEQ ID NO: 1201 - protein, 9 aa, synthetic construct
VVKHKKKVC

SEQ ID NO: 1202 - protein, 9 aa, synthetic construct
KKKCKNIFA

SEQ ID NO: 1203 - protein, 9 aa, synthetic construct
KLNKWKSKQ

SEQ ID NO: 1204 - protein, 9 aa, synthetic construct
KKKQKCVRG

SEQ ID NO: 1205 - protein, 9 aa, synthetic construct
AKKAKRWHK

SEQ ID NO: 1206 - protein, 9 aa, synthetic construct
KKRKLFVKN

SEQ ID NO: 1207 - protein, 9 aa, synthetic construct
KRKKKNHCR

SEQ ID NO: 1208 - protein, 9 aa, synthetic construct
KIKKKFDTI

SEQ ID NO: 1209 - protein, 9 aa, synthetic construct
KVKIKQIKQ

SEQ ID NO: 1210 - protein, 9 aa, synthetic construct
KKKIKMFCT

SEQ ID NO: 1211 - protein, 9 aa, synthetic construct
IYKWKKKGT

SEQ ID NO: 1212 - protein, 9 aa, synthetic construct
KRKGKKFCS

SEQ ID NO: 1213 - protein, 9 aa, synthetic construct
KKKTCKFEG

SEQ ID NO: 1214 - protein, 9 aa, synthetic construct
KTRMKRIQV

SEQ ID NO: 1215 - protein, 9 aa, synthetic construct
QAKKKKQWD

SEQ ID NO: 1216 - protein, 9 aa, synthetic construct
MKKKQKNVA

SEQ ID NO: 1217 - protein, 9 aa, synthetic construct
KKRKAHLQW

SEQ ID NO: 1218 - protein, 9 aa, synthetic construct
IKTKKKWGY

SEQ ID NO: 1219 - protein, 9 aa, synthetic construct
KCKAFKGYT

SEQ ID NO: 1220 - protein, 9 aa, synthetic construct
KVHKKKGWH

SEQ ID NO: 1221 - protein, 9 aa, synthetic construct
RFRKFRRCT

SEQ ID NO: 1222 - protein, 9 aa, synthetic construct
KSKKTKCLD

SEQ ID NO: 1223 - protein, 9 aa, synthetic construct
KKKQKQCYF

SEQ ID NO: 1224 - protein, 9 aa, synthetic construct
KQKKKPAIW

SEQ ID NO: 1225 - protein, 9 aa, synthetic construct
AKKRRKGSM

SEQ ID NO: 1226 - protein, 9 aa, synthetic construct
KVGKHLKKG

SEQ ID NO: 1227 - protein, 9 aa, synthetic construct
TRRRRWCGN

SEQ ID NO: 1228 - protein, 9 aa, synthetic construct
KKKKKRIFR

SEQ ID NO: 1229 - protein, 9 aa, synthetic construct
KPKMGKYTK

SEQ ID NO: 1230 - protein, 9 aa, synthetic construct
ARKKKAGKC

SEQ ID NO: 1231 - protein, 9 aa, synthetic construct
MTKMKKKMC

SEQ ID NO: 1232 - protein, 9 aa, synthetic construct
KRARLKHSQ

SEQ ID NO: 1233 - protein, 9 aa, synthetic construct
KGKKRAKTG

SEQ ID NO: 1234 - protein, 9 aa, synthetic construct
KQKFFKHAM

SEQ ID NO: 1235 - protein, 9 aa, synthetic construct
KKKRNRDGL

SEQ ID NO: 1236 - protein, 9 aa, synthetic construct
RSKQFRVHD

SEQ ID NO: 1237 - protein, 9 aa, synthetic construct
KRRKPCWRQ

SEQ ID NO: 1238 - protein, 9 aa, synthetic construct
QTKQKKWKN

SEQ ID NO: 1239 - protein, 9 aa, synthetic construct
KQRKHKVDT

SEQ ID NO: 1240 - protein, 9 aa, synthetic construct
KAKSKKGLM

SEQ ID NO: 1241 - protein, 9 aa, synthetic construct
EVKKKKFMP

SEQ ID NO: 1242 - protein, 9 aa, synthetic construct
KVKSHKLGQ

SEQ ID NO: 1243 - protein, 9 aa, synthetic construct
KKKRVQSRD

SEQ ID NO: 1244 - protein, 9 aa, synthetic construct
KAKRCKASC

SEQ ID NO: 1245 - protein, 9 aa, synthetic construct
VQKKGWQKK

SEQ ID NO: 1246 - protein, 9 aa, synthetic construct
KRKWKRDCF

SEQ ID NO: 1247 - protein, 9 aa, synthetic construct
KAKKSKHDR

SEQ ID NO: 1248 - protein, 9 aa, synthetic construct
KCKMMKIKC

SEQ ID NO: 1249 - protein, 9 aa, synthetic construct
KKKKFPECG

SEQ ID NO: 1250 - protein, 9 aa, synthetic construct
RYKHHRFLP

SEQ ID NO: 1251 - protein, 9 aa, synthetic construct
KKHRKGQMT

SEQ ID NO: 1252 - protein, 9 aa, synthetic construct
EWKKKKCFF

SEQ ID NO: 1253 - protein, 9 aa, synthetic construct
VKKRSKVQA

SEQ ID NO: 1254 - protein, 9 aa, synthetic construct
RRRRILHCP

SEQ ID NO: 1255 - protein, 9 aa, synthetic construct
MKKRQRGAS

SEQ ID NO: 1256 - protein, 9 aa, synthetic construct
KKHKKQLEN

SEQ ID NO: 1257 - protein, 9 aa, synthetic construct
QTKPKKTKC

SEQ ID NO: 1258 - protein, 9 aa, synthetic construct
KKKMQCIKC

SEQ ID NO: 1259 - protein, 9 aa, synthetic construct
QQKEKKWKE

SEQ ID NO: 1260 - protein, 9 aa, synthetic construct
KTKLYKYCY

SEQ ID NO: 1261 - protein, 9 aa, synthetic construct
PKKFKVHKC

SEQ ID NO: 1262 - protein, 9 aa, synthetic construct
YARRAKSTE

SEQ ID NO: 1263 - protein, 9 aa, synthetic construct
KPVKKQFKE

SEQ ID NO: 1264 - protein, 9 aa, synthetic construct
RCRSRRYPE

SEQ ID NO: 1265 - protein, 9 aa, synthetic construct
KRRYRKHNY

SEQ ID NO: 1266 - protein, 9 aa, synthetic construct
HKRTLKHWF

SEQ ID NO: 1267 - protein, 9 aa, synthetic construct
RTRRLSPRE

SEQ ID NO: 1268 - protein, 9 aa, synthetic construct
SKRKKGCVG

SEQ ID NO: 1269 - protein, 9 aa, synthetic construct
TKPKKKWWA

SEQ ID NO: 1270 - protein, 9 aa, synthetic construct
QSRKAKRIQ

SEQ ID NO: 1271 - protein, 9 aa, synthetic construct
RFKSRRSRA

SEQ ID NO: 1272 - protein, 9 aa, synthetic construct
LVGKKKTGK

SEQ ID NO: 1273 - protein, 9 aa, synthetic construct
MVKLKKKHH

SEQ ID NO: 1274 - protein, 9 aa, synthetic construct
KAKYWKHRF

SEQ ID NO: 1275 - protein, 9 aa, synthetic construct
RPKKVKNCE

SEQ ID NO: 1276 - protein, 9 aa, synthetic construct
HCRKRRHFH

SEQ ID NO: 1277 - protein, 9 aa, synthetic construct
VKKMKIWKH

SEQ ID NO: 1278 - protein, 9 aa, synthetic construct
KVRSKKMWS

SEQ ID NO: 1279 - protein, 9 aa, synthetic construct
ITKSKKKWT

SEQ ID NO: 1280 - protein, 9 aa, synthetic construct
KARKKMWSC

SEQ ID NO: 1281 - protein, 9 aa, synthetic construct
KVKPKSNKS

SEQ ID NO: 1282 - protein, 9 aa, synthetic construct
KIKRIIVAH

SEQ ID NO: 1283 - protein, 9 aa, synthetic construct
KKAHAKKVM

SEQ ID NO: 1284 - protein, 9 aa, synthetic construct
KKKQKRVGH

SEQ ID NO: 1285 - protein, 9 aa, synthetic construct
RKKGGKLVC

SEQ ID NO: 1286 - protein, 9 aa, synthetic construct
TKRKHKPVN

SEQ ID NO: 1287 - protein, 9 aa, synthetic construct
RRKSCRFHR

SEQ ID NO: 1288 - protein, 9 aa, synthetic construct
KKKYHPKWT

SEQ ID NO: 1289 - protein, 9 aa, synthetic construct
AAKRQKIQW

SEQ ID NO: 1290 - protein, 9 aa, synthetic construct
FVRKLKTTT

SEQ ID NO: 1291 - protein, 9 aa, synthetic construct
YCKLYKKKG

SEQ ID NO: 1292 - protein, 9 aa, synthetic construct
RRVRKHQRE

SEQ ID NO: 1293 - protein, 9 aa, synthetic construct
PKLKKKGFS

SEQ ID NO: 1294 - protein, 9 aa, synthetic construct
CPKNKKKVP

SEQ ID NO: 1295 - protein, 9 aa, synthetic construct
FKKCKGTKS

SEQ ID NO: 1296 - protein, 9 aa, synthetic construct
RQRKFKCMQ

SEQ ID NO: 1297 - protein, 9 aa, synthetic construct
KKHRFKLPV

SEQ ID NO: 1298 - protein, 9 aa, synthetic construct
DAKKDRYKK

SEQ ID NO: 1299 - protein, 9 aa, synthetic construct
KKHRSHPSQ

SEQ ID NO: 1300 - protein, 9 aa, synthetic construct
KMRKTKLWG

SEQ ID NO: 1301 - protein, 9 aa, synthetic construct
EKKKYCHKT

SEQ ID NO: 1302 - protein, 9 aa, synthetic construct
DVKKKKWPP

SEQ ID NO: 1303 - protein, 9 aa, synthetic construct
QVKSKKKQI

SEQ ID NO: 1304 - protein, 9 aa, synthetic construct
KIRKTKVYN

SEQ ID NO: 1305 - protein, 9 aa, synthetic construct
KIIKIKKFW

SEQ ID NO: 1306 - protein, 9 aa, synthetic construct
MKRKLKYAN

SEQ ID NO: 1307 - protein, 9 aa, synthetic construct
KAKSRQFCQ

SEQ ID NO: 1308 - protein, 9 aa, synthetic construct
ARARRRYCN

SEQ ID NO: 1309 - protein, 9 aa, synthetic construct
KKRGYHFQH

SEQ ID NO: 1310 - protein, 9 aa, synthetic construct
NKKQKCQKV

SEQ ID NO: 1311 - protein, 9 aa, synthetic construct
VTCKKKSKS

SEQ ID NO: 1312 - protein, 9 aa, synthetic construct
CIKKCKQWY

SEQ ID NO: 1313 - protein, 9 aa, synthetic construct
KAQKHLKKC

SEQ ID NO: 1314 - protein, 9 aa, synthetic construct
VRRKVRRTP

SEQ ID NO: 1315 - protein, 9 aa, synthetic construct
KSRQKKGPH

SEQ ID NO: 1316 - protein, 9 aa, synthetic construct
KRKTAKYFQ

SEQ ID NO: 1317 - protein, 9 aa, synthetic construct
KYKSRKVNS

SEQ ID NO: 1318 - protein, 9 aa, synthetic construct
YFRARRRYS

SEQ ID NO: 1319 - protein, 9 aa, synthetic construct
TRRKKKSWN

SEQ ID NO: 1320 - protein, 9 aa, synthetic construct
KKKPKSHLG

SEQ ID NO: 1321 - protein, 9 aa, synthetic construct
KRKKSGHFY

SEQ ID NO: 1322 - protein, 9 aa, synthetic construct
NRRVSRWRK

SEQ ID NO: 1323 - protein, 9 aa, synthetic construct
QRQKIRRRT

SEQ ID NO: 1324 - protein, 9 aa, synthetic construct
KMPKQKFKN

SEQ ID NO: 1325 - protein, 9 aa, synthetic construct
KKNKKCKKP

SEQ ID NO: 1326 - protein, 9 aa, synthetic construct
DTKRKKSCA

SEQ ID NO: 1327 - protein, 9 aa, synthetic construct
SKKRHRSHV

SEQ ID NO: 1328 - protein, 9 aa, synthetic construct
KYKQGGKQY

SEQ ID NO: 1329 - protein, 9 aa, synthetic construct
KSARKKWSC

SEQ ID NO: 1330 - protein, 9 aa, synthetic construct
HKKHFKKPL

SEQ ID NO: 1331 - protein, 9 aa, synthetic construct
GRRKYRADR

SEQ ID NO: 1332 - protein, 9 aa, synthetic construct
SVKHYKKHQ

SEQ ID NO: 1333 - protein, 9 aa, synthetic construct
NTKRLKCKQ

SEQ ID NO: 1334 - protein, 9 aa, synthetic construct
EKKFKKCGG

SEQ ID NO: 1335 - protein, 9 aa, synthetic construct
KKRYYHRPC

SEQ ID NO: 1336 - protein, 9 aa, synthetic construct
KGRKIRTQT

SEQ ID NO: 1337 - protein, 9 aa, synthetic construct
VKKRPKWSK

SEQ ID NO: 1338 - protein, 9 aa, synthetic construct
QIRRKKAYY

SEQ ID NO: 1339 - protein, 9 aa, synthetic construct
TCKRKKLNA

SEQ ID NO: 1340 - protein, 9 aa, synthetic construct
KARSLSRWL

SEQ ID NO: 1341 - protein, 9 aa, synthetic construct
KLKYIKRSA

SEQ ID NO: 1342 - protein, 9 aa, synthetic construct
KQRYRKHGQ

SEQ ID NO: 1343 - protein, 9 aa, synthetic construct
RWRRRQKLQ

SEQ ID NO: 1344 - protein, 9 aa, synthetic construct
DIKFKKKIF

SEQ ID NO: 1345 - protein, 9 aa, synthetic construct
HKKKCQNCN

SEQ ID NO: 1346 - protein, 9 aa, synthetic construct
RMKRYHYTG

SEQ ID NO: 1347 - protein, 9 aa, synthetic construct
KVKCIKQLG

SEQ ID NO: 1348 - protein, 9 aa, synthetic construct
RAKRYKHTW

SEQ ID NO: 1349 - protein, 9 aa, synthetic construct
KGKCMKNAQ

SEQ ID NO: 1350 - protein, 9 aa, synthetic construct
KNKKRVRGV

SEQ ID NO: 1351 - protein, 9 aa, synthetic construct
KLKKQPFKG

SEQ ID NO: 1352 - protein, 9 aa, synthetic construct
LKRKHRRTG

SEQ ID NO: 1353 - protein, 9 aa, synthetic construct
MKTKTHCKS

SEQ ID NO: 1354 - protein, 9 aa, synthetic construct
FYKRMRMHN

SEQ ID NO: 1355 - protein, 9 aa, synthetic construct
HRKFKKQAY

SEQ ID NO: 1356 - protein, 9 aa, synthetic construct
CKSRKRRGQ

SEQ ID NO: 1357 - protein, 9 aa, synthetic construct
HKKRTVAWM

SEQ ID NO: 1358 - protein, 9 aa, synthetic construct
KAKFCRKPQ

SEQ ID NO: 1359 - protein, 9 aa, synthetic construct
KHRKFRCMT

SEQ ID NO: 1360 - protein, 9 aa, synthetic construct
RRGRRWVPQ

SEQ ID NO: 1361 - protein, 9 aa, synthetic construct
CFRKYKNKG

SEQ ID NO: 1362 - protein, 9 aa, synthetic construct
KWKSKGKNC

SEQ ID NO: 1363 - protein, 9 aa, synthetic construct
HKHRKQRYV

SEQ ID NO: 1364 - protein, 9 aa, synthetic construct
RTRRYRHWL

SEQ ID NO: 1365 - protein, 9 aa, synthetic construct
KTRKGRSNH

SEQ ID NO: 1366 - protein, 9 aa, synthetic construct
PCRRRRLWG

SEQ ID NO: 1367 - protein, 9 aa, synthetic construct
KMRKAHVTG

SEQ ID NO: 1368 - protein, 9 aa, synthetic construct
SRKKCKVCY

SEQ ID NO: 1369 - protein, 9 aa, synthetic construct
KSKSKYWGV

SEQ ID NO: 1370 - protein, 9 aa, synthetic construct
KKKSKLFWN

SEQ ID NO: 1371 - protein, 9 aa, synthetic construct
KKMKCKEAR

SEQ ID NO: 1372 - protein, 9 aa, synthetic construct
VGKLKKKWQ

SEQ ID NO: 1373 - protein, 9 aa, synthetic construct
SVKSKKSGL

SEQ ID NO: 1374 - protein, 9 aa, synthetic construct
FSRKKKLYY

SEQ ID NO: 1375 - protein, 9 aa, synthetic construct
VNYKKKGKC

SEQ ID NO: 1376 - protein, 9 aa, synthetic construct
KWRKMKGCY

SEQ ID NO: 1377 - protein, 9 aa, synthetic construct
KMKSKADKG

SEQ ID NO: 1378 - protein, 9 aa, synthetic construct
ARKLKRTRF

SEQ ID NO: 1379 - protein, 9 aa, synthetic construct
KYRKTNVFW

SEQ ID NO: 1380 - protein, 9 aa, synthetic construct
KNKKEHKSD

SEQ ID NO: 1381 - protein, 9 aa, synthetic construct
KGKHRKFYA

SEQ ID NO: 1382 - protein, 9 aa, synthetic construct
KRKLGKFNG

SEQ ID NO: 1383 - protein, 9 aa, synthetic construct
KKARKGQPW

SEQ ID NO: 1384 - protein, 9 aa, synthetic construct
TAKRQRIKH

SEQ ID NO: 1385 - protein, 9 aa, synthetic construct
KRKRTNYWW

SEQ ID NO: 1386 - protein, 9 aa, synthetic construct
MQRKKKCTG

SEQ ID NO: 1387 - protein, 9 aa, synthetic construct
KKEKKIWTC

SEQ ID NO: 1388 - protein, 9 aa, synthetic construct
KQRKRFNSW

SEQ ID NO: 1389 - protein, 9 aa, synthetic construct
KKKALGFRS

SEQ ID NO: 1390 - protein, 9 aa, synthetic construct
KVRPKRAGP

SEQ ID NO: 1391 - protein, 9 aa, synthetic construct
EHRRRRIVG

SEQ ID NO: 1392 - protein, 9 aa, synthetic construct
KKKKCQAAP

SEQ ID NO: 1393 - protein, 9 aa, synthetic construct
VKKIKHVKG

SEQ ID NO: 1394 - protein, 9 aa, synthetic construct
RVRPTRKQC

SEQ ID NO: 1395 - protein, 9 aa, synthetic construct
KERKQKEMM

SEQ ID NO: 1396 - protein, 9 aa, synthetic construct
KRKKFMNAR

SEQ ID NO: 1397 - protein, 9 aa, synthetic construct
RIRKMTRTQ

SEQ ID NO: 1398 - protein, 9 aa, synthetic construct
KKKPNRIAA

SEQ ID NO: 1399 - protein, 9 aa, synthetic construct
KKKTIRHNP

SEQ ID NO: 1400 - protein, 9 aa, synthetic construct
VKKPRGRHP

SEQ ID NO: 1401 - protein, 9 aa, synthetic construct
RCRKFKSDM

SEQ ID NO: 1402 - protein, 9 aa, synthetic construct
KSKYAKNQA

SEQ ID NO: 1403 - protein, 9 aa, synthetic construct
KTCKTKTMF

SEQ ID NO: 1404 - protein, 9 aa, synthetic construct
HKKCKSQKS

SEQ ID NO: 1405 - protein, 9 aa, synthetic construct
KGRKYWCGG

SEQ ID NO: 1406 - protein, 9 aa, synthetic construct
KHKRRTFYP

SEQ ID NO: 1407 - protein, 9 aa, synthetic construct
KKSKEKAPF

SEQ ID NO: 1408 - protein, 9 aa, synthetic construct
KTCKKSKIV

SEQ ID NO: 1409 - protein, 9 aa, synthetic construct
RKKRWHVQY

SEQ ID NO: 1410 - protein, 9 aa, synthetic construct
KRSRLKRSH

SEQ ID NO: 1411 - protein, 9 aa, synthetic construct
SKKRYMYKS

SEQ ID NO: 1412 - protein, 9 aa, synthetic construct
SKVRKRFRV

SEQ ID NO: 1413 - protein, 9 aa, synthetic construct
CKAKRKSGY

SEQ ID NO: 1414 - protein, 9 aa, synthetic construct
VCRRIKGRW

SEQ ID NO: 1415 - protein, 9 aa, synthetic construct
HKTHKKKMT

SEQ ID NO: 1416 - protein, 9 aa, synthetic construct
KQKKYVMTA

SEQ ID NO: 1417 - protein, 9 aa, synthetic construct
KRRKQYHCK

SEQ ID NO: 1418 - protein, 9 aa, synthetic construct
KKATFKQAK

SEQ ID NO: 1419 - protein, 9 aa, synthetic construct
RIKCKKTTL

SEQ ID NO: 1420 - protein, 9 aa, synthetic construct
FKKRYLLWT

SEQ ID NO: 1421 - protein, 9 aa, synthetic construct
KKDRHKHKS

SEQ ID NO: 1422 - protein, 9 aa, synthetic construct
LARKFKLWH

SEQ ID NO: 1423 - protein, 9 aa, synthetic construct
TCCKKKKWM

SEQ ID NO: 1424 - protein, 9 aa, synthetic construct
RRRKIMGHS

SEQ ID NO: 1425 - protein, 9 aa, synthetic construct
KIKPCKKNH

SEQ ID NO: 1426 - protein, 9 aa, synthetic construct
KCKQYKMSV

SEQ ID NO: 1427 - protein, 9 aa, synthetic construct
KQKLQKQAP

SEQ ID NO: 1428 - protein, 9 aa, synthetic construct
KIKQCKRAW

SEQ ID NO: 1429 - protein, 9 aa, synthetic construct
KRKKQSVYN

SEQ ID NO: 1430 - protein, 9 aa, synthetic construct
HCKYHKKGF

SEQ ID NO: 1431 - protein, 9 aa, synthetic construct
GRRCCRRGF

SEQ ID NO: 1432 - protein, 9 aa, synthetic construct
TKRLKTRRD

SEQ ID NO: 1433 - protein, 9 aa, synthetic construct
QRPRKRKGG

SEQ ID NO: 1434 - protein, 9 aa, synthetic construct
KAKCSKSYC

SEQ ID NO: 1435 - protein, 9 aa, synthetic construct
RRRKGLMIQ

SEQ ID NO: 1436 - protein, 9 aa, synthetic construct
GKKKSKLGE

SEQ ID NO: 1437 - protein, 9 aa, synthetic construct
RKKALKRHG

SEQ ID NO: 1438 - protein, 9 aa, synthetic construct
SSKRRKQCF

SEQ ID NO: 1439 - protein, 9 aa, synthetic construct
KMKFQKYAC

SEQ ID NO: 1440 - protein, 9 aa, synthetic construct
KIRKWSAFE

SEQ ID NO: 1441 - protein, 9 aa, synthetic construct
KKRRTVHPN

SEQ ID NO: 1442 - protein, 9 aa, synthetic construct
KAGWLKKEK

SEQ ID NO: 1443 - protein, 9 aa, synthetic construct
KHKTKHNWE

SEQ ID NO: 1444 - protein, 9 aa, synthetic construct
DHKRQKRQP

SEQ ID NO: 1445 - protein, 9 aa, synthetic construct
KYKHRGGYT

SEQ ID NO: 1446 - protein, 9 aa, synthetic construct
EKKVKKEQW

SEQ ID NO: 1447 - protein, 9 aa, synthetic construct
MSKRFKTMG

SEQ ID NO: 1448 - protein, 9 aa, synthetic construct
PMKKKEYKC

SEQ ID NO: 1449 - protein, 9 aa, synthetic construct
QKKWKFKTC

SEQ ID NO: 1450 - protein, 9 aa, synthetic construct
EKKPQKKQY

SEQ ID NO: 1451 - protein, 9 aa, synthetic construct
RGKARRSYA

SEQ ID NO: 1452 - protein, 9 aa, synthetic construct
KIKRNRSNM

SEQ ID NO: 1453 - protein, 9 aa, synthetic construct
SKKCGKKDF

SEQ ID NO: 1454 - protein, 9 aa, synthetic construct
YWKKIKRWN

SEQ ID NO: 1455 - protein, 9 aa, synthetic construct
KYKQVKKLA

SEQ ID NO: 1456 - protein, 9 aa, synthetic construct
KQRKCYYKT

SEQ ID NO: 1457 - protein, 9 aa, synthetic construct
HRRKTRYFR

SEQ ID NO: 1458 - protein, 9 aa, synthetic construct
NCKGKCVKK

SEQ ID NO: 1459 - protein, 9 aa, synthetic construct
KTKFRGSKS

SEQ ID NO: 1460 - protein, 9 aa, synthetic construct
FKRKTRIDG

SEQ ID NO: 1461 - protein, 9 aa, synthetic construct
KTKCFKGGF

SEQ ID NO: 1462 - protein, 9 aa, synthetic construct
RVKHYRHYQ

SEQ ID NO: 1463 - protein, 9 aa, synthetic construct
DKKPKKQYW

SEQ ID NO: 1464 - protein, 9 aa, synthetic construct
HRKSKKWQP

SEQ ID NO: 1465 - protein, 9 aa, synthetic construct
RKGKKDCKG

SEQ ID NO: 1466 - protein, 9 aa, synthetic construct
KSRKHIRTW

SEQ ID NO: 1467 - protein, 9 aa, synthetic construct
AKQRQRHQP

SEQ ID NO: 1468 - protein, 9 aa, synthetic construct
MTKSKKRWN

SEQ ID NO: 1469 - protein, 9 aa, synthetic construct
RRRRYMLIA

SEQ ID NO: 1470 - protein, 9 aa, synthetic construct
CKKTKTHKF

SEQ ID NO: 1471 - protein, 9 aa, synthetic construct
KQVKKKKES

SEQ ID NO: 1472 - protein, 9 aa, synthetic construct
HTKRKGAWM

SEQ ID NO: 1473 - protein, 9 aa, synthetic construct
KRMKRSRND

SEQ ID NO: 1474 - protein, 9 aa, synthetic construct
KQRRKCVCY

SEQ ID NO: 1475 - protein, 9 aa, synthetic construct
KKKCQSFGS

SEQ ID NO: 1476 - protein, 9 aa, synthetic construct
KKKASGWTT

SEQ ID NO: 1477 - protein, 9 aa, synthetic construct
EVKSKKRQP

SEQ ID NO: 1478 - protein, 9 aa, synthetic construct
CRRRLKCGE

SEQ ID NO: 1479 - protein, 9 aa, synthetic construct
KAKSRGGYN

SEQ ID NO: 1480 - protein, 9 aa, synthetic construct
LAKYKKSYH

SEQ ID NO: 1481 - protein, 9 aa, synthetic construct
KCKKCYKCD

SEQ ID NO: 1482 - protein, 9 aa, synthetic construct
LKKKTKPCG

SEQ ID NO: 1483 - protein, 9 aa, synthetic construct
EARRKKGWH

SEQ ID NO: 1484 - protein, 9 aa, synthetic construct
CPRKSKFCM

SEQ ID NO: 1485 - protein, 9 aa, synthetic construct
MNARVKRVG

SEQ ID NO: 1486 - protein, 9 aa, synthetic construct
KCKFVKAHT

SEQ ID NO: 1487 - protein, 9 aa, synthetic construct
KKRNKAQYV

SEQ ID NO: 1488 - protein, 9 aa, synthetic construct
MVKRNKHYG

SEQ ID NO: 1489 - protein, 9 aa, synthetic construct
KARWKGRVQ

SEQ ID NO: 1490 - protein, 9 aa, synthetic construct
CSKKRKAGT

SEQ ID NO: 1491 - protein, 9 aa, synthetic construct
GVRKTKWCN

SEQ ID NO: 1492 - protein, 9 aa, synthetic construct
KQKFRGMRY

SEQ ID NO: 1493 - protein, 9 aa, synthetic construct
VKRKHKFEN

SEQ ID NO: 1494 - protein, 9 aa, synthetic construct
KGRKWGGTG

SEQ ID NO: 1495 - protein, 9 aa, synthetic construct
IVKRLKQGA

SEQ ID NO: 1496 - protein, 9 aa, synthetic construct
SKRKLGQVN

SEQ ID NO: 1497 - protein, 9 aa, synthetic construct
KYKSQKWTV

SEQ ID NO: 1498 - protein, 9 aa, synthetic construct
KRTRKKRMV

SEQ ID NO: 1499 - protein, 9 aa, synthetic construct
MYKLKKTAV

SEQ ID NO: 1500 - protein, 9 aa, synthetic construct
HRRKWLYPA

SEQ ID NO: 1501 - protein, 9 aa, synthetic construct
KKKTYSCLS

SEQ ID NO: 1502 - protein, 9 aa, synthetic construct
KRKRLPYGM

SEQ ID NO: 1503 - protein, 9 aa, synthetic construct
KRRKNVWCP

SEQ ID NO: 1504 - protein, 9 aa, synthetic construct
HKRKRYVAV

SEQ ID NO: 1505 - protein, 9 aa, synthetic construct
KVRVHKMVC

SEQ ID NO: 1506 - protein, 9 aa, synthetic construct
KWRKEKMHY

SEQ ID NO: 1507 - protein, 9 aa, synthetic construct
KQKQKKVGP

SEQ ID NO: 1508 - protein, 9 aa, synthetic construct
KRKAKQGCN

SEQ ID NO: 1509 - protein, 9 aa, synthetic construct
TNKSKKSQN

SEQ ID NO: 1510 - protein, 9 aa, synthetic construct
VKRRKIYGA

SEQ ID NO: 1511 - protein, 9 aa, synthetic construct
KIRLRKGVS

SEQ ID NO: 1512 - protein, 9 aa, synthetic construct
KCKIVKQMG

SEQ ID NO: 1513 - protein, 9 aa, synthetic construct
KCRKQHHTM

SEQ ID NO: 1514 - protein, 9 aa, synthetic construct
RAKIHRYYT

SEQ ID NO: 1515 - protein, 9 aa, synthetic construct
GKRKHMPCP

SEQ ID NO: 1516 - protein, 9 aa, synthetic construct
KCKKDRKQC

SEQ ID NO: 1517 - protein, 9 aa, synthetic construct
QKHRTKKWS

SEQ ID NO: 1518 - protein, 9 aa, synthetic construct
IKKKFGRCC

SEQ ID NO: 1519 - protein, 9 aa, synthetic construct
LKRKDKFGE

SEQ ID NO: 1520 - protein, 9 aa, synthetic construct
KSRKAWLCM

SEQ ID NO: 1521 - protein, 9 aa, synthetic construct
RFRGHRCWR

SEQ ID NO: 1522 - protein, 9 aa, synthetic construct
EKRKSKCCP

SEQ ID NO: 1523 - protein, 9 aa, synthetic construct
KRRKQMHRV

SEQ ID NO: 1524 - protein, 9 aa, synthetic construct
KQKWWKYGC

SEQ ID NO: 1525 - protein, 9 aa, synthetic construct
KQKYGKFYN

SEQ ID NO: 1526 - protein, 9 aa, synthetic construct
NGKLFKKHV

SEQ ID NO: 1527 - protein, 9 aa, synthetic construct
TTKSFKWRQ

SEQ ID NO: 1528 - protein, 9 aa, synthetic construct
KKRIHRHEY

SEQ ID NO: 1529 - protein, 9 aa, synthetic construct
HTKSKKFFS

SEQ ID NO: 1530 - protein, 9 aa, synthetic construct
KSRSKQRQC

SEQ ID NO: 1531 - protein, 9 aa, synthetic construct
NVRRYKTHI

SEQ ID NO: 1532 - protein, 9 aa, synthetic construct
VKKRYHRQQ

SEQ ID NO: 1533 - protein, 9 aa, synthetic construct
HIRKAKKQC

SEQ ID NO: 1534 - protein, 9 aa, synthetic construct
KRRRIRHLM

SEQ ID NO: 1535 - protein, 9 aa, synthetic construct
KKKIGTKCF

SEQ ID NO: 1536 - protein, 9 aa, synthetic construct
ESKRKRSMN

SEQ ID NO: 1537 - protein, 9 aa, synthetic construct
YCKLKKIHQ

SEQ ID NO: 1538 - protein, 9 aa, synthetic construct
NKMSKKKVC

SEQ ID NO: 1539 - protein, 9 aa, synthetic construct
FFKKRRVCC

SEQ ID NO: 1540 - protein, 9 aa, synthetic construct
RKKVCRFSN

SEQ ID NO: 1541 - protein, 9 aa, synthetic construct
SVKMMKTLP

SEQ ID NO: 1542 - protein, 9 aa, synthetic construct
KVRWKHGGA

SEQ ID NO: 1543 - protein, 9 aa, synthetic construct
ITRKNKLWQ

SEQ ID NO: 1544 - protein, 9 aa, synthetic construct
VIRRMRNFF

SEQ ID NO: 1545 - protein, 9 aa, synthetic construct
RRRRLTPSA

SEQ ID NO: 1546 - protein, 9 aa, synthetic construct
KNRRKKYAC

SEQ ID NO: 1547 - protein, 9 aa, synthetic construct
KIRQKCMKF

SEQ ID NO: 1548 - protein, 9 aa, synthetic construct
ACKNKKKDG

SEQ ID NO: 1549 - protein, 9 aa, synthetic construct
CFKRRKYMV

SEQ ID NO: 1550 - protein, 9 aa, synthetic construct
KAKKRANDY

SEQ ID NO: 1551 - protein, 9 aa, synthetic construct
RRKHMRSKS

SEQ ID NO: 1552 - protein, 9 aa, synthetic construct
GSRRRKHTH

SEQ ID NO: 1553 - protein, 9 aa, synthetic construct
KVKMRGFWD

SEQ ID NO: 1554 - protein, 9 aa, synthetic construct
KGRKRHQYM

SEQ ID NO: 1555 - protein, 9 aa, synthetic construct
RYKSCKAKG

SEQ ID NO: 1556 - protein, 9 aa, synthetic construct
RRQRSRYWF

SEQ ID NO: 1557 - protein, 9 aa, synthetic construct
HIRKQKNNN

SEQ ID NO: 1558 - protein, 9 aa, synthetic construct
GSRKRKMCT

SEQ ID NO: 1559 - protein, 9 aa, synthetic construct
RYKCYREYP

SEQ ID NO: 1560 - protein, 9 aa, synthetic construct
CKKFAKKHD

SEQ ID NO: 1561 - protein, 9 aa, synthetic construct
KDKMCKAKG

SEQ ID NO: 1562 - protein, 9 aa, synthetic construct
KRRKTHTKV

SEQ ID NO: 1563 - protein, 9 aa, synthetic construct
SGKKGKSDN

SEQ ID NO: 1564 - protein, 9 aa, synthetic construct
HKRKPYSWM

SEQ ID NO: 1565 - protein, 9 aa, synthetic construct
RHRKKVTHD

SEQ ID NO: 1566 - protein, 9 aa, synthetic construct
IVKSKKSYI

SEQ ID NO: 1567 - protein, 9 aa, synthetic construct
QSKTTKKVC

SEQ ID NO: 1568 - protein, 9 aa, synthetic construct
TKTAKKCKG

SEQ ID NO: 1569 - protein, 9 aa, synthetic construct
RKGKCKFVY

SEQ ID NO: 1570 - protein, 9 aa, synthetic construct
KTKRSWCSG

SEQ ID NO: 1571 - protein, 9 aa, synthetic construct
SSKKPKHCA

SEQ ID NO: 1572 - protein, 9 aa, synthetic construct
RLRRMWYSG

SEQ ID NO: 1573 - protein, 9 aa, synthetic construct
HKRRNNWWP

SEQ ID NO: 1574 - protein, 9 aa, synthetic construct
KCKLQKNNV

SEQ ID NO: 1575 - protein, 9 aa, synthetic construct
KAKSRRYVE

SEQ ID NO: 1576 - protein, 9 aa, synthetic construct
KRKFYKCNM

SEQ ID NO: 1577 - protein, 9 aa, synthetic construct
KKKYCIGHM

SEQ ID NO: 1578 - protein, 9 aa, synthetic construct
KKKANRATY

SEQ ID NO: 1579 - protein, 9 aa, synthetic construct
DFKKCKMWQ

SEQ ID NO: 1580 - protein, 9 aa, synthetic construct
KRKALKVDS

SEQ ID NO: 1581 - protein, 9 aa, synthetic construct
KKQRFRAAY

SEQ ID NO: 1582 - protein, 9 aa, synthetic construct
YHRKGKHRN

SEQ ID NO: 1583 - protein, 9 aa, synthetic construct
HVRSKRHMM

SEQ ID NO: 1584 - protein, 9 aa, synthetic construct
KFGKQKTLC

SEQ ID NO: 1585 - protein, 9 aa, synthetic construct
TKRRYHHHC

SEQ ID NO: 1586 - protein, 9 aa, synthetic construct
KKHRGSFHN

SEQ ID NO: 1587 - protein, 9 aa, synthetic construct
RMKTRKTCS

SEQ ID NO: 1588 - protein, 9 aa, synthetic construct
KMKCSKHKD

SEQ ID NO: 1589 - protein, 9 aa, synthetic construct
GNRRRKYWG

SEQ ID NO: 1590 - protein, 9 aa, synthetic construct
CYRRYKSYC

SEQ ID NO: 1591 - protein, 9 aa, synthetic construct
EWKRYRVQS

SEQ ID NO: 1592 - protein, 9 aa, synthetic construct
LKKTHKKSH

SEQ ID NO: 1593 - protein, 9 aa, synthetic construct
KLKNKHWFC

SEQ ID NO: 1594 - protein, 9 aa, synthetic construct
ICHRRRRCH

SEQ ID NO: 1595 - protein, 9 aa, synthetic construct
PKRKQKWAS

SEQ ID NO: 1596 - protein, 9 aa, synthetic construct
KHKRSYQAH

SEQ ID NO: 1597 - protein, 9 aa, synthetic construct
KLKSNKQCC

SEQ ID NO: 1598 - protein, 9 aa, synthetic construct
KRKKNTFVV

SEQ ID NO: 1599 - protein, 9 aa, synthetic construct
KRRSYKWIN

SEQ ID NO: 1600 - protein, 9 aa, synthetic construct
TARKTKQMI

SEQ ID NO: 1601 - protein, 9 aa, synthetic construct
VARRKRHYT

SEQ ID NO: 1602 - protein, 9 aa, synthetic construct
HKHRYRYLW

SEQ ID NO: 1603 - protein, 9 aa, synthetic construct
STRRMTRGM

SEQ ID NO: 1604 - protein, 9 aa, synthetic construct
MVRRYRSAA

SEQ ID NO: 1605 - protein, 9 aa, synthetic construct
KAKVRQFSK

SEQ ID NO: 1606 - protein, 9 aa, synthetic construct
MCKRVRTPP

SEQ ID NO: 1607 - protein, 9 aa, synthetic construct
HRRKKVTCA

SEQ ID NO: 1608 - protein, 9 aa, synthetic construct
HQKKQKWPH

SEQ ID NO: 1609 - protein, 9 aa, synthetic construct
TRKRYVVYA

SEQ ID NO: 1610 - protein, 9 aa, synthetic construct
KFRKANWPE

SEQ ID NO: 1611 - protein, 9 aa, synthetic construct
KSRQYKRTW

SEQ ID NO: 1612 - protein, 9 aa, synthetic construct
EMKKYKKWP

SEQ ID NO: 1613 - protein, 9 aa, synthetic construct
KLKKKLSEE

SEQ ID NO: 1614 - protein, 9 aa, synthetic construct
TFKKTKFIP

SEQ ID NO: 1615 - protein, 9 aa, synthetic construct
CKKKTLAQV

SEQ ID NO: 1616 - protein, 9 aa, synthetic construct
QKAKYKWCF

SEQ ID NO: 1617 - protein, 9 aa, synthetic construct
GKRRMRSGW

SEQ ID NO: 1618 - protein, 9 aa, synthetic construct
KKHKAGGQL

SEQ ID NO: 1619 - protein, 9 aa, synthetic construct
MAKNKKCGL

SEQ ID NO: 1620 - protein, 9 aa, synthetic construct
FVKSRRFPN

SEQ ID NO: 1621 - protein, 9 aa, synthetic construct
KCRKIAHNC

SEQ ID NO: 1622 - protein, 9 aa, synthetic construct
HRKPRRVHS

SEQ ID NO: 1623 - protein, 9 aa, synthetic construct
TRRRTKISQ

SEQ ID NO: 1624 - protein, 9 aa, synthetic construct
RVRHKRRHW

SEQ ID NO: 1625 - protein, 9 aa, synthetic construct
KVRNWKSMA

SEQ ID NO: 1626 - protein, 9 aa, synthetic construct
FRRTRRYWS

SEQ ID NO: 1627 - protein, 9 aa, synthetic construct
VTKYKKKAF

SEQ ID NO: 1628 - protein, 9 aa, synthetic construct
YKRKQQCAQ

SEQ ID NO: 1629 - protein, 9 aa, synthetic construct
KRKYHKLCN

SEQ ID NO: 1630 - protein, 9 aa, synthetic construct
KKRHRVSHT

SEQ ID NO: 1631 - protein, 9 aa, synthetic construct
LMKAKKKDT

SEQ ID NO: 1632 - protein, 9 aa, synthetic construct
KYKNKKIVG

SEQ ID NO: 1633 - protein, 9 aa, synthetic construct
IVKKHKKAE

SEQ ID NO: 1634 - protein, 9 aa, synthetic construct
DVKFCRYYR

SEQ ID NO: 1635 - protein, 9 aa, synthetic construct
GYPRRGRRT

SEQ ID NO: 1636 - protein, 9 aa, synthetic construct
VKKGPRTEK

SEQ ID NO: 1637 - protein, 9 aa, synthetic construct
TNKSKKCMW

SEQ ID NO: 1638 - protein, 9 aa, synthetic construct
AFKRFRSDC

SEQ ID NO: 1639 - protein, 9 aa, synthetic construct
KAKQKGFMN

SEQ ID NO: 1640 - protein, 9 aa, synthetic construct
AIKAKKVGF

SEQ ID NO: 1641 - protein, 9 aa, synthetic construct
KTKRRMLRQ

SEQ ID NO: 1642 - protein, 9 aa, synthetic construct
KGKKHQFSP

SEQ ID NO: 1643 - protein, 9 aa, synthetic construct
KKKSHKLSM

SEQ ID NO: 1644 - protein, 9 aa, synthetic construct
KSKIQKIHM

SEQ ID NO: 1645 - protein, 9 aa, synthetic construct
MSRKKMWRS

SEQ ID NO: 1646 - protein, 9 aa, synthetic construct
KKYRFNWNH

SEQ ID NO: 1647 - protein, 9 aa, synthetic construct
KKKCQQCCH

SEQ ID NO: 1648 - protein, 9 aa, synthetic construct
KIKAFRWQG

SEQ ID NO: 1649 - protein, 9 aa, synthetic construct
QLKKFKYKA

SEQ ID NO: 1650 - protein, 9 aa, synthetic construct
RTRKANHGT

SEQ ID NO: 1651 - protein, 9 aa, synthetic construct
EARKAKMYA

SEQ ID NO: 1652 - protein, 9 aa, synthetic construct
SVKKWKQRE

SEQ ID NO: 1653 - protein, 9 aa, synthetic construct
AKGKPKVMC

SEQ ID NO: 1654 - protein, 9 aa, synthetic construct
RGRKRWVNH

SEQ ID NO: 1655 - protein, 9 aa, synthetic construct
KSKCFKLQS

SEQ ID NO: 1656 - protein, 9 aa, synthetic construct
KRQSRKCRG

SEQ ID NO: 1657 - protein, 9 aa, synthetic construct
KGRGTKYKY

SEQ ID NO: 1658 - protein, 9 aa, synthetic construct
KIKRMKARC

SEQ ID NO: 1659 - protein, 9 aa, synthetic construct
MVKSKKKNF

SEQ ID NO: 1660 - protein, 9 aa, synthetic construct
AVKYYRRQQ

SEQ ID NO: 1661 - protein, 9 aa, synthetic construct
KHKWKRTSF

SEQ ID NO: 1662 - protein, 9 aa, synthetic construct
KKKSCICVY

SEQ ID NO: 1663 - protein, 9 aa, synthetic construct
KGRKCGPMM

SEQ ID NO: 1664 - protein, 9 aa, synthetic construct
MIRKAKINC

SEQ ID NO: 1665 - protein, 9 aa, synthetic construct
KAKTKQQWS

SEQ ID NO: 1666 - protein, 9 aa, synthetic construct
KKSKCHQRC

SEQ ID NO: 1667 - protein, 9 aa, synthetic construct
TAKRQGLKQ

SEQ ID NO: 1668 - protein, 9 aa, synthetic construct
KYRQKRCVQ

SEQ ID NO: 1669 - protein, 9 aa, synthetic construct
KQKVQCSHK

SEQ ID NO: 1670 - protein, 9 aa, synthetic construct
KWKRHFKGS

SEQ ID NO: 1671 - protein, 9 aa, synthetic construct
HKKYWKNSA

SEQ ID NO: 1672 - protein, 9 aa, synthetic construct
KVRSKQWVW

SEQ ID NO: 1673 - protein, 9 aa, synthetic construct
QKRKYVHKG

SEQ ID NO: 1674 - protein, 9 aa, synthetic construct
RKKFIKMQC

SEQ ID NO: 1675 - protein, 9 aa, synthetic construct
PRRRTRLTH

SEQ ID NO: 1676 - protein, 9 aa, synthetic construct
KIRPKRLEM

SEQ ID NO: 1677 - protein, 9 aa, synthetic construct
KQKVTKIGS

SEQ ID NO: 1678 - protein, 9 aa, synthetic construct
FKRKTAVKP

SEQ ID NO: 1679 - protein, 9 aa, synthetic construct
KVKSGKRAQ

SEQ ID NO: 1680 - protein, 9 aa, synthetic construct
KLRAARYRG

SEQ ID NO: 1681 - protein, 9 aa, synthetic construct
KVKPRGMHR

SEQ ID NO: 1682 - protein, 9 aa, synthetic construct
KVRRHKGVL

SEQ ID NO: 1683 - protein, 9 aa, synthetic construct
KYKAMKTCG

SEQ ID NO: 1684 - protein, 9 aa, synthetic construct
LMKFKKQFC

SEQ ID NO: 1685 - protein, 9 aa, synthetic construct
KKKQKTAHH

SEQ ID NO: 1686 - protein, 9 aa, synthetic construct
KAKSKWHNF

SEQ ID NO: 1687 - protein, 9 aa, synthetic construct
KIKRYGSCD

SEQ ID NO: 1688 - protein, 9 aa, synthetic construct
DAKKWKKCH

SEQ ID NO: 1689 - protein, 9 aa, synthetic construct
KRRRSKYET

SEQ ID NO: 1690 - protein, 9 aa, synthetic construct
RIRFIKYAH

SEQ ID NO: 1691 - protein, 9 aa, synthetic construct
RVKWTRQNQ

SEQ ID NO: 1692 - protein, 9 aa, synthetic construct
MGRKLKSKE

SEQ ID NO: 1693 - protein, 9 aa, synthetic construct
KTRKVHIWT

SEQ ID NO: 1694 - protein, 9 aa, synthetic construct
TKKITKHSS

SEQ ID NO: 1695 - protein, 9 aa, synthetic construct
VGKRSKISW

SEQ ID NO: 1696 - protein, 9 aa, synthetic construct
MPKRKRCAS

SEQ ID NO: 1697 - protein, 9 aa, synthetic construct
NHKSYKRQH

SEQ ID NO: 1698 - protein, 9 aa, synthetic construct
LKNKTKKQA

SEQ ID NO: 1699 - protein, 9 aa, synthetic construct
NYKKFKCFQ

SEQ ID NO: 1700 - protein, 9 aa, synthetic construct
RHRHDRFRH

SEQ ID NO: 1701 - protein, 9 aa, synthetic construct
KLKIVKWAH

SEQ ID NO: 1702 - protein, 9 aa, synthetic construct
SYKVKKSAY

SEQ ID NO: 1703 - protein, 9 aa, synthetic construct
AGKKFKCSI

SEQ ID NO: 1704 - protein, 9 aa, synthetic construct
SARKKGQVI

SEQ ID NO: 1705 - protein, 9 aa, synthetic construct
RRRLQKSNS

SEQ ID NO: 1706 - protein, 9 aa, synthetic construct
MAKTKKYWQ

SEQ ID NO: 1707 - protein, 9 aa, synthetic construct
KRRKYWRFE

SEQ ID NO: 1708 - protein, 9 aa, synthetic construct
LWKYKKKFD

SEQ ID NO: 1709 - protein, 9 aa, synthetic construct
KWKCGKFYS

SEQ ID NO: 1710 - protein, 9 aa, synthetic construct
KKRSVKSKG

SEQ ID NO: 1711 - protein, 9 aa, synthetic construct
IAKKHKSGM

SEQ ID NO: 1712 - protein, 9 aa, synthetic construct
RVNKMKTYP

SEQ ID NO: 1713 - protein, 9 aa, synthetic construct
RRKSTKNHK

SEQ ID NO: 1714 - protein, 9 aa, synthetic construct
LARKCKWVC

SEQ ID NO: 1715 - protein, 9 aa, synthetic construct
SVKKAKWYN

SEQ ID NO: 1716 - protein, 9 aa, synthetic construct
KWRAIKGQS

SEQ ID NO: 1717 - protein, 9 aa, synthetic construct
KKTVKRRTG

SEQ ID NO: 1718 - protein, 9 aa, synthetic construct
KIKMLKGVM

SEQ ID NO: 1719 - protein, 9 aa, synthetic construct
VHKLNKMKW

SEQ ID NO: 1720 - protein, 9 aa, synthetic construct
KGKVYKDKQ

SEQ ID NO: 1721 - protein, 9 aa, synthetic construct
KYKLRKTLF

SEQ ID NO: 1722 - protein, 9 aa, synthetic construct
IVKLKKCIM

SEQ ID NO: 1723 - protein, 9 aa, synthetic construct
RKRASKVCN

SEQ ID NO: 1724 - protein, 9 aa, synthetic construct
KKTRRKKEF

SEQ ID NO: 1725 - protein, 9 aa, synthetic construct
KKRKLDFCS

SEQ ID NO: 1726 - protein, 9 aa, synthetic construct
KAARKKSMC

SEQ ID NO: 1727 - protein, 9 aa, synthetic construct
KARKCTPSH

SEQ ID NO: 1728 - protein, 9 aa, synthetic construct
MNKKTKYHH

SEQ ID NO: 1729 - protein, 9 aa, synthetic construct
RKKSRYCHP

SEQ ID NO: 1730 - protein, 9 aa, synthetic construct
QAKQKKHYH

SEQ ID NO: 1731 - protein, 9 aa, synthetic construct
TVKKHKDSN

SEQ ID NO: 1732 - protein, 9 aa, synthetic construct
NVKSKKKFW

SEQ ID NO: 1733 - protein, 9 aa, synthetic construct
SVKRCKAYT

SEQ ID NO: 1734 - protein, 9 aa, synthetic construct
KHRKSIWVQ

SEQ ID NO: 1735 - protein, 9 aa, synthetic construct
NKRKKSQDV

SEQ ID NO: 1736 - protein, 9 aa, synthetic construct
RRRGWKERC

SEQ ID NO: 1737 - protein, 9 aa, synthetic construct
KRKYRQNGN

SEQ ID NO: 1738 - protein, 9 aa, synthetic construct
KFKTPKGWT

SEQ ID NO: 1739 - protein, 9 aa, synthetic construct
KKKFGGAHW

SEQ ID NO: 1740 - protein, 9 aa, synthetic construct
AVKRRKCPG

SEQ ID NO: 1741 - protein, 9 aa, synthetic construct
KRIRKKISS

SEQ ID NO: 1742 - protein, 9 aa, synthetic construct
IKKSPKKRM

SEQ ID NO: 1743 - protein, 9 aa, synthetic construct
KARNSRYSI

SEQ ID NO: 1744 - protein, 9 aa, synthetic construct
MVKPRRSIA

SEQ ID NO: 1745 - protein, 9 aa, synthetic construct
YTKSKKSAL

SEQ ID NO: 1746 - protein, 9 aa, synthetic construct
HRKRWHAMH

SEQ ID NO: 1747 - protein, 9 aa, synthetic construct
KRKNAGRGV

SEQ ID NO: 1748 - protein, 9 aa, synthetic construct
KAHKRKQAN

SEQ ID NO: 1749 - protein, 9 aa, synthetic construct
KKARSHWRC

SEQ ID NO: 1750 - protein, 9 aa, synthetic construct
KMRPSKFHS

SEQ ID NO: 1751 - protein, 9 aa, synthetic construct
RVRKARSFP

SEQ ID NO: 1752 - protein, 9 aa, synthetic construct
KARKYGRYL

SEQ ID NO: 1753 - protein, 9 aa, synthetic construct
RKKRQACWF

SEQ ID NO: 1754 - protein, 9 aa, synthetic construct
SQKAYRGHS

SEQ ID NO: 1755 - protein, 9 aa, synthetic construct
HIRKARYDH

SEQ ID NO: 1756 - protein, 9 aa, synthetic construct
HAKQKHQKQ

SEQ ID NO: 1757 - protein, 9 aa, synthetic construct
RTKSCKWKH

SEQ ID NO: 1758 - protein, 9 aa, synthetic construct
KSRKQYAQW

SEQ ID NO: 1759 - protein, 9 aa, synthetic construct
KGGKKRCKV

SEQ ID NO: 1760 - protein, 9 aa, synthetic construct
DKPKKKYAA

SEQ ID NO: 1761 - protein, 9 aa, synthetic construct
KLKSCKQCS

SEQ ID NO: 1762 - protein, 9 aa, synthetic construct
HTKAYRRES

SEQ ID NO: 1763 - protein, 9 aa, synthetic construct
KKRLKPTSG

SEQ ID NO: 1764 - protein, 9 aa, synthetic construct
HKKYRKQWA

SEQ ID NO: 1765 - protein, 9 aa, synthetic construct
KTKFRKNCT

SEQ ID NO: 1766 - protein, 9 aa, synthetic construct
TLKCKRKGM

SEQ ID NO: 1767 - protein, 9 aa, synthetic construct
KSRKHANSG

SEQ ID NO: 1768 - protein, 9 aa, synthetic construct
KRKRCMIDH

SEQ ID NO: 1769 - protein, 9 aa, synthetic construct
HKRRITYWM

SEQ ID NO: 1770 - protein, 9 aa, synthetic construct
ISKAKKTNM

SEQ ID NO: 1771 - protein, 9 aa, synthetic construct
KFRNRRCAY

SEQ ID NO: 1772 - protein, 9 aa, synthetic construct
TTKYHKKCW

SEQ ID NO: 1773 - protein, 9 aa, synthetic construct
RTRKWKWWP

SEQ ID NO: 1774 - protein, 9 aa, synthetic construct
KTKQLKCTK

SEQ ID NO: 1775 - protein, 9 aa, synthetic construct
NFRKYKMHN

SEQ ID NO: 1776 - protein, 9 aa, synthetic construct
KRRRSPYMS

SEQ ID NO: 1777 - protein, 9 aa, synthetic construct
NAKWIKKWY

SEQ ID NO: 1778 - protein, 9 aa, synthetic construct
KYRIRRHMC

SEQ ID NO: 1779 - protein, 9 aa, synthetic construct
GSKNKKQMC

SEQ ID NO: 1780 - protein, 9 aa, synthetic construct
MLKKGKHHP

SEQ ID NO: 1781 - protein, 9 aa, synthetic construct
YWKRTRFQF

SEQ ID NO: 1782 - protein, 9 aa, synthetic construct
IMRKFKRES

SEQ ID NO: 1783 - protein, 9 aa, synthetic construct
KRKRVAAKD

SEQ ID NO: 1784 - protein, 9 aa, synthetic construct
KARKQWMHS

SEQ ID NO: 1785 - protein, 9 aa, synthetic construct
RSKIYRTWE

SEQ ID NO: 1786 - protein, 9 aa, synthetic construct
SCKKKRMIF

SEQ ID NO: 1787 - protein, 9 aa, synthetic construct
KTRLKKITR

SEQ ID NO: 1788 - protein, 9 aa, synthetic construct
TARKRKHTT

SEQ ID NO: 1789 - protein, 9 aa, synthetic construct
HFKCQKWRF

SEQ ID NO: 1790 - protein, 9 aa, synthetic construct
KGQRKKSGL

SEQ ID NO: 1791 - protein, 9 aa, synthetic construct
KSKGKQWYT

SEQ ID NO: 1792 - protein, 9 aa, synthetic construct
KRRPIRDCF

SEQ ID NO: 1793 - protein, 9 aa, synthetic construct
TVKKSRLRN

SEQ ID NO: 1794 - protein, 9 aa, synthetic construct
SMRKFKWKE

SEQ ID NO: 1795 - protein, 9 aa, synthetic construct
VGKGKKQMC

SEQ ID NO: 1796 - protein, 9 aa, synthetic construct
QKGLKKHKP

SEQ ID NO: 1797 - protein, 9 aa, synthetic construct
PSRKLKRLC

SEQ ID NO: 1798 - protein, 9 aa, synthetic construct
SVRRNKHVY

SEQ ID NO: 1799 - protein, 9 aa, synthetic construct
FMKRCKMQT

SEQ ID NO: 1800 - protein, 9 aa, synthetic construct
NKKKFHHAQ

SEQ ID NO: 1801 - protein, 9 aa, synthetic construct
TNKKFKSVS

SEQ ID NO: 1802 - protein, 9 aa, synthetic construct
TRRKRPCYP

SEQ ID NO: 1803 - protein, 9 aa, synthetic construct
NRKRQRNWE

SEQ ID NO: 1804 - protein, 9 aa, synthetic construct
RAKTSRTEV

SEQ ID NO: 1805 - protein, 9 aa, synthetic construct
YKPRKRNAT

SEQ ID NO: 1806 - protein, 9 aa, synthetic construct
CKKKLSRHQ

SEQ ID NO: 1807 - protein, 9 aa, synthetic construct
KVRKSRGQS

SEQ ID NO: 1808 - protein, 9 aa, synthetic construct
HQKGKKRGL

SEQ ID NO: 1809 - protein, 9 aa, synthetic construct
SKKPMKKCC

SEQ ID NO: 1810 - protein, 9 aa, synthetic construct
KQKKSHSHG

SEQ ID NO: 1811 - protein, 9 aa, synthetic construct
RIKLQRAMH

SEQ ID NO: 1812 - protein, 9 aa, synthetic construct
KQKKQLDTT

SEQ ID NO: 1813 - protein, 9 aa, synthetic construct
THKCKKTGV

SEQ ID NO: 1814 - protein, 9 aa, synthetic construct
RLKMHRAMC

SEQ ID NO: 1815 - protein, 9 aa, synthetic construct
KHKCSKFYQ

SEQ ID NO: 1816 - protein, 9 aa, synthetic construct
NVRNKRAHP

SEQ ID NO: 1817 - protein, 9 aa, synthetic construct
NKHKPKYHL

SEQ ID NO: 1818 - protein, 9 aa, synthetic construct
SAKLKKRCN

SEQ ID NO: 1819 - protein, 9 aa, synthetic construct
KGKNKIGDN

SEQ ID NO: 1820 - protein, 9 aa, synthetic construct
KLKSKTFAS

SEQ ID NO: 1821 - protein, 9 aa, synthetic construct
QCKRTKHYK

SEQ ID NO: 1822 - protein, 9 aa, synthetic construct
YAKPKKYCL

SEQ ID NO: 1823 - protein, 9 aa, synthetic construct
KRSRMRCFW

SEQ ID NO: 1824 - protein, 9 aa, synthetic construct
QKKQLKAAA

SEQ ID NO: 1825 - protein, 9 aa, synthetic construct
LKLRKKHGQ

SEQ ID NO: 1826 - protein, 9 aa, synthetic construct
KTKKAYVVS

SEQ ID NO: 1827 - protein, 9 aa, synthetic construct
RSMRIRRDY

SEQ ID NO: 1828 - protein, 9 aa, synthetic construct
KKKTNTHLG

SEQ ID NO: 1829 - protein, 9 aa, synthetic construct
KRKYNRSWC

SEQ ID NO: 1830 - protein, 9 aa, synthetic construct
RRRKQDHVC

SEQ ID NO: 1831 - protein, 9 aa, synthetic construct
CVKSKKTGY

SEQ ID NO: 1832 - protein, 9 aa, synthetic construct
SCKSKKSQH

SEQ ID NO: 1833 - protein, 9 aa, synthetic construct
LRKQKKWTG

SEQ ID NO: 1834 - protein, 9 aa, synthetic construct
KRRKCPQYE

SEQ ID NO: 1835 - protein, 9 aa, synthetic construct
KIKNRKSWE

SEQ ID NO: 1836 - protein, 9 aa, synthetic construct
AGRKAKRVW

SEQ ID NO: 1837 - protein, 9 aa, synthetic construct
KRRHGHIHS

SEQ ID NO: 1838 - protein, 9 aa, synthetic construct
KMKNMTMWM

SEQ ID NO: 1839 - protein, 9 aa, synthetic construct
KRRHNKNYD

SEQ ID NO: 1840 - protein, 9 aa, synthetic construct
IRMRKKVGG

SEQ ID NO: 1841 - protein, 9 aa, synthetic construct
VRKHIKRQY

SEQ ID NO: 1842 - protein, 9 aa, synthetic construct
KKKTSWMGM

SEQ ID NO: 1843 - protein, 9 aa, synthetic construct
HKRFYKVMW

SEQ ID NO: 1844 - protein, 9 aa, synthetic construct
HKKRVCRMG

SEQ ID NO: 1845 - protein, 9 aa, synthetic construct
KVCKFKQSA

SEQ ID NO: 1846 - protein, 9 aa, synthetic construct
WFKIKRRRS

SEQ ID NO: 1847 - protein, 9 aa, synthetic construct
KRRNKHPYW

SEQ ID NO: 1848 - protein, 9 aa, synthetic construct
KTKCNRKAT

SEQ ID NO: 1849 - protein, 9 aa, synthetic construct
DCKKKGALS

SEQ ID NO: 1850 - protein, 9 aa, synthetic construct
KGSFKKKMP

SEQ ID NO: 1851 - protein, 9 aa, synthetic construct
KGRYKQRSS

SEQ ID NO: 1852 - protein, 9 aa, synthetic construct
HKQRKQQWV

SEQ ID NO: 1853 - protein, 9 aa, synthetic construct
HKKRENYVF

SEQ ID NO: 1854 - protein, 9 aa, synthetic construct
VKRKPPRGM

SEQ ID NO: 1855 - protein, 9 aa, synthetic construct
KAKLYRQFP

SEQ ID NO: 1856 - protein, 9 aa, synthetic construct
KCRRARSMD

SEQ ID NO: 1857 - protein, 9 aa, synthetic construct
KATKKFAAT

SEQ ID NO: 1858 - protein, 9 aa, synthetic construct
SKCNKKKWF

SEQ ID NO: 1859 - protein, 9 aa, synthetic construct
KSSRKRIYQ

SEQ ID NO: 1860 - protein, 9 aa, synthetic construct
KKRAGGMCH

SEQ ID NO: 1861 - protein, 9 aa, synthetic construct
RRRMRKIAF

SEQ ID NO: 1862 - protein, 9 aa, synthetic construct
KNKKASIIG

SEQ ID NO: 1863 - protein, 9 aa, synthetic construct
RKRMAKQPG

SEQ ID NO: 1864 - protein, 9 aa, synthetic construct
NVRKHKCIH

SEQ ID NO: 1865 - protein, 9 aa, synthetic construct
KWKRTKIVW

SEQ ID NO: 1866 - protein, 9 aa, synthetic construct
VGRFGRVGT

SEQ ID NO: 1867 - protein, 9 aa, synthetic construct
CVKTKKTAP

SEQ ID NO: 1868 - protein, 9 aa, synthetic construct
KKRSFNCIF

SEQ ID NO: 1869 - protein, 9 aa, synthetic construct
MQKKTKGCY

SEQ ID NO: 1870 - protein, 9 aa, synthetic construct
SVKYKKQTN

SEQ ID NO: 1871 - protein, 9 aa, synthetic construct
KKHKHQINC

SEQ ID NO: 1872 - protein, 9 aa, synthetic construct
KCKPVRRAE

SEQ ID NO: 1873 - protein, 9 aa, synthetic construct
IYRRYMRAH

SEQ ID NO: 1874 - protein, 9 aa, synthetic construct
QCRRGRHQQ

SEQ ID NO: 1875 - protein, 9 aa, synthetic construct
HKRKWFDKP

SEQ ID NO: 1876 - protein, 9 aa, synthetic construct
KQRKLGLGE

SEQ ID NO: 1877 - protein, 9 aa, synthetic construct
KNKIYREIQ

SEQ ID NO: 1878 - protein, 9 aa, synthetic construct
KQKQTKFGN

SEQ ID NO: 1879 - protein, 9 aa, synthetic construct
RVKIPIQIR

SEQ ID NO: 1880 - protein, 9 aa, synthetic construct
NKHRYKCKY

SEQ ID NO: 1881 - protein, 9 aa, synthetic construct
RKRYSKLNS

SEQ ID NO: 1882 - protein, 9 aa, synthetic construct
NKHKMRHHN

SEQ ID NO: 1883 - protein, 9 aa, synthetic construct
KRQRKIWRQ

SEQ ID NO: 1884 - protein, 9 aa, synthetic construct
KVRRCKLKY

SEQ ID NO: 1885 - protein, 9 aa, synthetic construct
CSKKSKRQS

SEQ ID NO: 1886 - protein, 9 aa, synthetic construct
HRKTVKWNA

SEQ ID NO: 1887 - protein, 9 aa, synthetic construct
KGKSPKLTG

SEQ ID NO: 1888 - protein, 9 aa, synthetic construct
HIRKHWGSR

SEQ ID NO: 1889 - protein, 9 aa, synthetic construct
KSKSKSVHD

SEQ ID NO: 1890 - protein, 9 aa, synthetic construct
NTRKLKNCW

SEQ ID NO: 1891 - protein, 9 aa, synthetic construct
RNKRRAWNN

SEQ ID NO: 1892 - protein, 9 aa, synthetic construct
FCKSKRINC

SEQ ID NO: 1893 - protein, 9 aa, synthetic construct
KRKGQGRTC

SEQ ID NO: 1894 - protein, 9 aa, synthetic construct
NKCGKKKQP

SEQ ID NO: 1895 - protein, 9 aa, synthetic construct
RCRRQKVPY

SEQ ID NO: 1896 - protein, 9 aa, synthetic construct
EKRKKGIHA

SEQ ID NO: 1897 - protein, 9 aa, synthetic construct
LTRKYKYCT

SEQ ID NO: 1898 - protein, 9 aa, synthetic construct
KTRRPHQTV

SEQ ID NO: 1899 - protein, 9 aa, synthetic construct
QVKHFKWTS

SEQ ID NO: 1900 - protein, 9 aa, synthetic construct
KVKFSKWYK

SEQ ID NO: 1901 - protein, 9 aa, synthetic construct
QKCKVKYAY

SEQ ID NO: 1902 - protein, 9 aa, synthetic construct
VKRLKKAVC

SEQ ID NO: 1903 - protein, 9 aa, synthetic construct
SEKRMKRKG

SEQ ID NO: 1904 - protein, 9 aa, synthetic construct
KCGRKPINK

SEQ ID NO: 1905 - protein, 9 aa, synthetic construct
LQKAKKHWQ

SEQ ID NO: 1906 - protein, 9 aa, synthetic construct
DFKVRKKYP

SEQ ID NO: 1907 - protein, 9 aa, synthetic construct
KVRHWKCSM

SEQ ID NO: 1908 - protein, 9 aa, synthetic construct
KSRKQANAE

SEQ ID NO: 1909 - protein, 9 aa, synthetic construct
KNRLKKRSP

SEQ ID NO: 1910 - protein, 9 aa, synthetic construct
KHRMFQRSW

SEQ ID NO: 1911 - protein, 9 aa, synthetic construct
HMRKAKQFT

SEQ ID NO: 1912 - protein, 9 aa, synthetic construct
RERKLKFQD

SEQ ID NO: 1913 - protein, 9 aa, synthetic construct
KYKSGKHHW

SEQ ID NO: 1914 - protein, 9 aa, synthetic construct
KRRHIRRPG

SEQ ID NO: 1915 - protein, 9 aa, synthetic construct
KWKFKPFSQ

SEQ ID NO: 1916 - protein, 9 aa, synthetic construct
KRKKQQGYH

SEQ ID NO: 1917 - protein, 9 aa, synthetic construct
LKRRSPHQY

SEQ ID NO: 1918 - protein, 9 aa, synthetic construct
IQRKSKCGC

SEQ ID NO: 1919 - protein, 9 aa, synthetic construct
KGKMKRLET

SEQ ID NO: 1920 - protein, 9 aa, synthetic construct
VIKFKKCYS

SEQ ID NO: 1921 - protein, 9 aa, synthetic construct
SVKPRKKAS

SEQ ID NO: 1922 - protein, 9 aa, synthetic construct
KGGKNKVMV

SEQ ID NO: 1923 - protein, 9 aa, synthetic construct
MAKSCKCKQ

SEQ ID NO: 1924 - protein, 9 aa, synthetic construct
KKDKKHLTF

SEQ ID NO: 1925 - protein, 9 aa, synthetic construct
KSKPRGRGT

SEQ ID NO: 1926 - protein, 9 aa, synthetic construct
CSKLMKKKP

SEQ ID NO: 1927 - protein, 9 aa, synthetic construct
KSRKQGISC

SEQ ID NO: 1928 - protein, 9 aa, synthetic construct
KTKEKKLCY

SEQ ID NO: 1929 - protein, 9 aa, synthetic construct
QGKSKKWNF

SEQ ID NO: 1930 - protein, 9 aa, synthetic construct
FKKRMHRKC

SEQ ID NO: 1931 - protein, 9 aa, synthetic construct
KTKKHGNQQ

SEQ ID NO: 1932 - protein, 9 aa, synthetic construct
KKKLYWSQP

SEQ ID NO: 1933 - protein, 9 aa, synthetic construct
TVKKAKRFS

SEQ ID NO: 1934 - protein, 9 aa, synthetic construct
HKHRSIVKC

SEQ ID NO: 1935 - protein, 9 aa, synthetic construct
HNKKMRLSG

SEQ ID NO: 1936 - protein, 9 aa, synthetic construct
CYKSKKLCN

SEQ ID NO: 1937 - protein, 9 aa, synthetic construct
KVKWRVKPE

SEQ ID NO: 1938 - protein, 9 aa, synthetic construct
KARFIRHSA

SEQ ID NO: 1939 - protein, 9 aa, synthetic construct
KKRVGPNVA

SEQ ID NO: 1940 - protein, 9 aa, synthetic construct
KKNRKAKDY

SEQ ID NO: 1941 - protein, 9 aa, synthetic construct
KKKWKEWLH

SEQ ID NO: 1942 - protein, 9 aa, synthetic construct
CHRKVKIVC

SEQ ID NO: 1943 - protein, 9 aa, synthetic construct
KKKFWTIGN

SEQ ID NO: 1944 - protein, 9 aa, synthetic construct
MAKRPRLGT

SEQ ID NO: 1945 - protein, 9 aa, synthetic construct
KLRTMKGLG

SEQ ID NO: 1946 - protein, 9 aa, synthetic construct
QYKAYKKVQ

SEQ ID NO: 1947 - protein, 9 aa, synthetic construct
TFRKCKGYW

SEQ ID NO: 1948 - protein, 9 aa, synthetic construct
NKRKKAFDN

SEQ ID NO: 1949 - protein, 9 aa, synthetic construct
KKKWTQHMS

SEQ ID NO: 1950 - protein, 9 aa, synthetic construct
RQKAIKSFH

SEQ ID NO: 1951 - protein, 9 aa, synthetic construct
KYRGWKSPG

SEQ ID NO: 1952 - protein, 9 aa, synthetic construct
ANKKRRRAY

SEQ ID NO: 1953 - protein, 9 aa, synthetic construct
VVKAKKNIM

SEQ ID NO: 1954 - protein, 9 aa, synthetic construct
KKIKYRKTF

SEQ ID NO: 1955 - protein, 9 aa, synthetic construct
KKKWQGQAP

SEQ ID NO: 1956 - protein, 9 aa, synthetic construct
GAKWYKKGM

SEQ ID NO: 1957 - protein, 9 aa, synthetic construct
RSRPSKQVV

SEQ ID NO: 1958 - protein, 9 aa, synthetic construct
GTRRNRVQQ

SEQ ID NO: 1959 - protein, 9 aa, synthetic construct
IRKKSRSKS

SEQ ID NO: 1960 - protein, 9 aa, synthetic construct
KKKHLHGHS

SEQ ID NO: 1961 - protein, 9 aa, synthetic construct
GLKKHKMAS

SEQ ID NO: 1962 - protein, 9 aa, synthetic construct
SKRRTNRAV

SEQ ID NO: 1963 - protein, 9 aa, synthetic construct
RQKKKMANE

SEQ ID NO: 1964 - protein, 9 aa, synthetic construct
WRKRCKNTS

SEQ ID NO: 1965 - protein, 9 aa, synthetic construct
LGRKQKLWH

SEQ ID NO: 1966 - protein, 9 aa, synthetic construct
AVRYKRRQE

SEQ ID NO: 1967 - protein, 9 aa, synthetic construct
KQRKSVGRQ

SEQ ID NO: 1968 - protein, 9 aa, synthetic construct
KWKKQTCFL

SEQ ID NO: 1969 - protein, 9 aa, synthetic construct
KGKRRWCKC

SEQ ID NO: 1970 - protein, 9 aa, synthetic construct
CVRRTRWRN

SEQ ID NO: 1971 - protein, 9 aa, synthetic construct
KRRKTPLHT

SEQ ID NO: 1972 - protein, 9 aa, synthetic construct
MKKHHRQHW

SEQ ID NO: 1973 - protein, 9 aa, synthetic construct
YTKSSRKGP

SEQ ID NO: 1974 - protein, 9 aa, synthetic construct
KQRFFKTGS

SEQ ID NO: 1975 - protein, 9 aa, synthetic construct
KLKHRGRWH

SEQ ID NO: 1976 - protein, 9 aa, synthetic construct
HVKGHRRLV

SEQ ID NO: 1977 - protein, 9 aa, synthetic construct
LKRKQRCQH

SEQ ID NO: 1978 - protein, 9 aa, synthetic construct
DSKYRRSAR

SEQ ID NO: 1979 - protein, 9 aa, synthetic construct
KQRKATICS

SEQ ID NO: 1980 - protein, 9 aa, synthetic construct
EYKKKHKCG

SEQ ID NO: 1981 - protein, 9 aa, synthetic construct
KIRPKKQVY

SEQ ID NO: 1982 - protein, 9 aa, synthetic construct
CRKVHRNYC

SEQ ID NO: 1983 - protein, 9 aa, synthetic construct
KARMKRQKR

SEQ ID NO: 1984 - protein, 9 aa, synthetic construct
KLKKPRNCY

SEQ ID NO: 1985 - protein, 9 aa, synthetic construct
KRKWWLMHS

SEQ ID NO: 1986 - protein, 9 aa, synthetic construct
KIKMHGWRH

SEQ ID NO: 1987 - protein, 9 aa, synthetic construct
KNKKAKYCS

SEQ ID NO: 1988 - protein, 9 aa, synthetic construct
KIKKKQLDD

SEQ ID NO: 1989 - protein, 9 aa, synthetic construct
KRARQKWQA

SEQ ID NO: 1990 - protein, 9 aa, synthetic construct
RTKNRYWRV

SEQ ID NO: 1991 - protein, 9 aa, synthetic construct
YKPRHLHKE

SEQ ID NO: 1992 - protein, 9 aa, synthetic construct
KRPGKRKRN

SEQ ID NO: 1993 - protein, 9 aa, synthetic construct
KIKLFKQGY

SEQ ID NO: 1994 - protein, 9 aa, synthetic construct
IKKRMNSSL

SEQ ID NO: 1995 - protein, 9 aa, synthetic construct
RRRHYKVNS

SEQ ID NO: 1996 - protein, 9 aa, synthetic construct
KSKMSKHGA

SEQ ID NO: 1997 - protein, 9 aa, synthetic construct
KLKEHKRMF

SEQ ID NO: 1998 - protein, 9 aa, synthetic construct
AKKMLKRRG

SEQ ID NO: 1999 - protein, 9 aa, synthetic construct
QAKIIKKGM

SEQ ID NO: 2000 - protein, 9 aa, synthetic construct
NHRRKKCQF

SEQ ID NO: 2001 - protein, 9 aa, synthetic construct
CRRKSKGQC

SEQ ID NO: 2002 - protein, 9 aa, synthetic construct
KGRGMKWMH

SEQ ID NO: 2003 - protein, 9 aa, synthetic construct
RWRLKKFQG

SEQ ID NO: 2004 - protein, 9 aa, synthetic construct
RTRKWQKIW

SEQ ID NO: 2005 - protein, 9 aa, synthetic construct
WKKRYSLQM

SEQ ID NO: 2006 - protein, 9 aa, synthetic construct
CKKRYSHGQ

SEQ ID NO: 2007 - protein, 9 aa, synthetic construct
DAKSKKRAA

SEQ ID NO: 2008 - protein, 9 aa, synthetic construct
SKKRNQLIQ

SEQ ID NO: 2009 - protein, 9 aa, synthetic construct
SPRPRKQAM

SEQ ID NO: 2010 - protein, 9 aa, synthetic construct
VKKKAGLTQ

SEQ ID NO: 2011 - protein, 9 aa, synthetic construct
HHRKPKYDT

SEQ ID NO: 2012 - protein, 9 aa, synthetic construct
NRKARRCTD

SEQ ID NO: 2013 - protein, 9 aa, synthetic construct
IAKWKKCTM

SEQ ID NO: 2014 - protein, 9 aa, synthetic construct
DCTFHDAEI

SEQ ID NO: 2015 - protein, 9 aa, synthetic construct
TDEHVKMGP

SEQ ID NO: 2016 - protein, 9 aa, synthetic construct
GTVWKNWPD

SEQ ID NO: 2017 - protein, 9 aa, synthetic construct
NIEPTANCQ

SEQ ID NO: 2018 - protein, 9 aa, synthetic construct
DEMAHYASS

SEQ ID NO: 2019 - protein, 9 aa, synthetic construct
WINYTVKDR

SEQ ID NO: 2020 - protein, 9 aa, synthetic construct
EFDQCTHGI

SEQ ID NO: 2021 - protein, 9 aa, synthetic construct
QIYVTHQGP

SEQ ID NO: 2022 - protein, 9 aa, synthetic construct
GTVNEYSWN

SEQ ID NO: 2023 - protein, 9 aa, synthetic construct
VRYACLYEN

SEQ ID NO: 2024 - protein, 9 aa, synthetic construct
WFDHNYCFG

SEQ ID NO: 2025 - protein, 9 aa, synthetic construct
EYCPCGEVQ

SEQ ID NO: 2026 - protein, 9 aa, synthetic construct
DRPCAVHEA

SEQ ID NO: 2027 - protein, 9 aa, synthetic construct
VCVNRLECP

SEQ ID NO: 2028 - protein, 9 aa, synthetic construct
TEQKQYESI

SEQ ID NO: 2029 - protein, 9 aa, synthetic construct
TDNCKGECQ

SEQ ID NO: 2030 - protein, 9 aa, synthetic construct
CNTQFMKRE

SEQ ID NO: 2031 - protein, 9 aa, synthetic construct
MMIQNHCLS

SEQ ID NO: 2032 - protein, 9 aa, synthetic construct
AVTAPTFRG

SEQ ID NO: 2033 - protein, 9 aa, synthetic construct
FYTNAGCYC

SEQ ID NO: 2034 - protein, 9 aa, synthetic construct
AQQSWEQIQ

SEQ ID NO: 2035 - protein, 9 aa, synthetic construct
MHMNQCVID

SEQ ID NO: 2036 - protein, 9 aa, synthetic construct
IHTIEQKCS

SEQ ID NO: 2037 - protein, 9 aa, synthetic construct
IKLDVEMAG

SEQ ID NO: 2038 - protein, 9 aa, synthetic construct
AHCTKTMQV

SEQ ID NO: 2039 - protein, 9 aa, synthetic construct
MPQQNVAVP

SEQ ID NO: 2040 - protein, 9 aa, synthetic construct
MQYFWHYAH

SEQ ID NO: 2041 - protein, 9 aa, synthetic construct
AYESKIHTG

SEQ ID NO: 2042 - protein, 9 aa, synthetic construct
MSLWCSEER

SEQ ID NO: 2043 - protein, 9 aa, synthetic construct
LATAHSMRF

SEQ ID NO: 2044 - protein, 9 aa, synthetic construct
VWYFYNEAP

SEQ ID NO: 2045 - protein, 9 aa, synthetic construct
VQMAVLAYW

SEQ ID NO: 2046 - protein, 9 aa, synthetic construct
VVLTQLEDS

SEQ ID NO: 2047 - protein, 9 aa, synthetic construct
NQMFNNEYP

SEQ ID NO: 2048 - protein, 9 aa, synthetic construct
HTYGSLAQY

SEQ ID NO: 2049 - protein, 9 aa, synthetic construct
NTFMECVGG

SEQ ID NO: 2050 - protein, 9 aa, synthetic construct
VKQMGCDIA

SEQ ID NO: 2051 - protein, 9 aa, synthetic construct
HGQCALHTV

SEQ ID NO: 2052 - protein, 9 aa, synthetic construct
MIGTFAYHQ

SEQ ID NO: 2053 - protein, 9 aa, synthetic construct
VNPTKAEYA

SEQ ID NO: 2054 - protein, 9 aa, synthetic construct
LMLGAYKEC

SEQ ID NO: 2055 - protein, 9 aa, synthetic construct
MGEPTCEYR

SEQ ID NO: 2056 - protein, 9 aa, synthetic construct
LTVMWGCCY

SEQ ID NO: 2057 - protein, 9 aa, synthetic construct
PNHCYSTWN

SEQ ID NO: 2058 - protein, 9 aa, synthetic construct
DLHAYICFI

SEQ ID NO: 2059 - protein, 9 aa, synthetic construct
WVTMHNQLC

SEQ ID NO: 2060 - protein, 9 aa, synthetic construct
GMEYYAHNW

SEQ ID NO: 2061 - protein, 9 aa, synthetic construct
PPNVTVDQE

SEQ ID NO: 2062 - protein, 9 aa, synthetic construct
QPDTVWHYA

SEQ ID NO: 2063 - protein, 9 aa, synthetic construct
VSWVERACP

SEQ ID NO: 2064 - protein, 9 aa, synthetic construct
CPPDHCYTA

SEQ ID NO: 2065 - protein, 9 aa, synthetic construct
NTQSQACYI

SEQ ID NO: 2066 - protein, 9 aa, synthetic construct
EYWFTHAEN

SEQ ID NO: 2067 - protein, 9 aa, synthetic construct
PLEVWQTYT

SEQ ID NO: 2068 - protein, 9 aa, synthetic construct
LVTMADHHA

SEQ ID NO: 2069 - protein, 9 aa, synthetic construct
STENHHFEN

SEQ ID NO: 2070 - protein, 9 aa, synthetic construct
DALTDFEGC

SEQ ID NO: 2071 - protein, 9 aa, synthetic construct
EHCDGWRIS

SEQ ID NO: 2072 - protein, 9 aa, synthetic construct
AQQAVEEVQ

SEQ ID NO: 2073 - protein, 9 aa, synthetic construct
MITNLFMAG

SEQ ID NO: 2074 - protein, 9 aa, synthetic construct
NKTDGHYQC

SEQ ID NO: 2075 - protein, 9 aa, synthetic construct
DGLNEEMWK

SEQ ID NO: 2076 - protein, 9 aa, synthetic construct
TQLRDMISS

SEQ ID NO: 2077 - protein, 9 aa, synthetic construct
SEQRTNHYA

SEQ ID NO: 2078 - protein, 9 aa, synthetic construct
HVTDHQGGI

SEQ ID NO: 2079 - protein, 9 aa, synthetic construct
HQCCGLVMQ

SEQ ID NO: 2080 - protein, 9 aa, synthetic construct
AQNGFDKDL

SEQ ID NO: 2081 - protein, 9 aa, synthetic construct
VFQAFMRSM

SEQ ID NO: 2082 - protein, 9 aa, synthetic construct
FSCPKDGYA

SEQ ID NO: 2083 - protein, 9 aa, synthetic construct
NGGMFELTL

SEQ ID NO: 2084 - protein, 9 aa, synthetic construct
QNDTLEHFY

SEQ ID NO: 2085 - protein, 9 aa, synthetic construct
DQLQKDFYF

SEQ ID NO: 2086 - protein, 9 aa, synthetic construct
TSDATCQWI

SEQ ID NO: 2087 - protein, 9 aa, synthetic construct
ATNENIMAW

SEQ ID NO: 2088 - protein, 9 aa, synthetic construct
EPAQKAGIS

SEQ ID NO: 2089 - protein, 9 aa, synthetic construct
QTALRWNWD

SEQ ID NO: 2090 - protein, 9 aa, synthetic construct
ELEPVVCQW

SEQ ID NO: 2091 - protein, 9 aa, synthetic construct
NACTHNTFT

SEQ ID NO: 2092 - protein, 9 aa, synthetic construct
HADANTKTY

SEQ ID NO: 2093 - protein, 9 aa, synthetic construct
PEYSTDHPN

SEQ ID NO: 2094 - protein, 9 aa, synthetic construct
YAVTDQEGH

SEQ ID NO: 2095 - protein, 9 aa, synthetic construct
AIFMHPLTE

SEQ ID NO: 2096 - protein, 9 aa, synthetic construct
AWQGATHEA

SEQ ID NO: 2097 - protein, 9 aa, synthetic construct
QTYFMHTSA

SEQ ID NO: 2098 - protein, 9 aa, synthetic construct
TASHVAEFK

SEQ ID NO: 2099 - protein, 9 aa, synthetic construct
IHPVQFCKC

SEQ ID NO: 2100 - protein, 9 aa, synthetic construct
QHMISHDKA

SEQ ID NO: 2101 - protein, 9 aa, synthetic construct
IYTHCWHEY

SEQ ID NO: 2102 - protein, 9 aa, synthetic construct
IAEPHYTAA

SEQ ID NO: 2103 - protein, 9 aa, synthetic construct
TDMIVKEQC

SEQ ID NO: 2104 - protein, 9 aa, synthetic construct
NNQPPDGAC

SEQ ID NO: 2105 - protein, 9 aa, synthetic construct
QIEPTPEHT

SEQ ID NO: 2106 - protein, 9 aa, synthetic construct
EILVYMYFH

SEQ ID NO: 2107 - protein, 9 aa, synthetic construct
MMCNKIHDE

SEQ ID NO: 2108 - protein, 9 aa, synthetic construct
MVFTRFDHN

SEQ ID NO: 2109 - protein, 9 aa, synthetic construct
LWECATCNP

SEQ ID NO: 2110 - protein, 9 aa, synthetic construct
NVEMGPRAM

SEQ ID NO: 2111 - protein, 9 aa, synthetic construct
CANMEDTDY

SEQ ID NO: 2112 - protein, 9 aa, synthetic construct
PDKACQMID

SEQ ID NO: 2113 - protein, 9 aa, synthetic construct
SHGEKCMSV

SEQ ID NO: 2114 - protein, 9 aa, synthetic construct
EFTLFDSDR

SEQ ID NO: 2115 - protein, 9 aa, synthetic construct
ETLFYNAFA

SEQ ID NO: 2116 - protein, 9 aa, synthetic construct
VTLISHCKC

SEQ ID NO: 2117 - protein, 9 aa, synthetic construct
LNCCYKEMT

SEQ ID NO: 2118 - protein, 9 aa, synthetic construct
TCTSCVHDY

SEQ ID NO: 2119 - protein, 9 aa, synthetic construct
FTCIWFRWA

SEQ ID NO: 2120 - protein, 9 aa, synthetic construct
MHPSTSVTC

SEQ ID NO: 2121 - protein, 9 aa, synthetic construct
QKNHFEMQQ

SEQ ID NO: 2122 - protein, 9 aa, synthetic construct
NDLYKANYN

SEQ ID NO: 2123 - protein, 9 aa, synthetic construct
TVFQMQMCN

SEQ ID NO: 2124 - protein, 9 aa, synthetic construct
PEHCEAWPV

SEQ ID NO: 2125 - protein, 9 aa, synthetic construct
DVEMFFMVG

SEQ ID NO: 2126 - protein, 9 aa, synthetic construct
MLYWCLQNG

SEQ ID NO: 2127 - protein, 9 aa, synthetic construct
YTGWLMSDM

SEQ ID NO: 2128 - protein, 9 aa, synthetic construct
HCVVMQRMY

SEQ ID NO: 2129 - protein, 9 aa, synthetic construct
LHDVAAENR

SEQ ID NO: 2130 - protein, 9 aa, synthetic construct
EEEHCAKLG

SEQ ID NO: 2131 - protein, 9 aa, synthetic construct
HTMYVDTAN

SEQ ID NO: 2132 - protein, 9 aa, synthetic construct
CLDWLHREY

SEQ ID NO: 2133 - protein, 9 aa, synthetic construct
PPCETAHTY

SEQ ID NO: 2134 - protein, 9 aa, synthetic construct
GVHTKMIAW

SEQ ID NO: 2135 - protein, 9 aa, synthetic construct
HDVCMSYKS

SEQ ID NO: 2136 - protein, 9 aa, synthetic construct
NLPQPVLMM

SEQ ID NO: 2137 - protein, 9 aa, synthetic construct
IPGDYVNLS

SEQ ID NO: 2138 - protein, 9 aa, synthetic construct
TSTVFHNWC

SEQ ID NO: 2139 - protein, 9 aa, synthetic construct
DKLDINMTL

SEQ ID NO: 2140 - protein, 9 aa, synthetic construct
CHYQGEHIP

SEQ ID NO: 2141 - protein, 9 aa, synthetic construct
TYEVNCENA

SEQ ID NO: 2142 - protein, 9 aa, synthetic construct
NFDTQPKAI

SEQ ID NO: 2143 - protein, 9 aa, synthetic construct
MCMPADQTL

SEQ ID NO: 2144 - protein, 9 aa, synthetic construct
AKETWDCVG

SEQ ID NO: 2145 - protein, 9 aa, synthetic construct
PGPAHVDHI

SEQ ID NO: 2146 - protein, 9 aa, synthetic construct
ATIVTQHGC

SEQ ID NO: 2147 - protein, 9 aa, synthetic construct
GMYIMKEHQ

SEQ ID NO: 2148 - protein, 9 aa, synthetic construct
PTHATTMVQ

SEQ ID NO: 2149 - protein, 9 aa, synthetic construct
DVYAMVRPC

SEQ ID NO: 2150 - protein, 9 aa, synthetic construct
ESHPLWHDL

SEQ ID NO: 2151 - protein, 9 aa, synthetic construct
QSVMASTAN

SEQ ID NO: 2152 - protein, 9 aa, synthetic construct
NEGVCSYVQ

SEQ ID NO: 2153 - protein, 9 aa, synthetic construct
HIYSCDQSN

SEQ ID NO: 2154 - protein, 9 aa, synthetic construct
STTKHENGH

SEQ ID NO: 2155 - protein, 9 aa, synthetic construct
GQQPYNRME

SEQ ID NO: 2156 - protein, 9 aa, synthetic construct
ITVTKCSDV

SEQ ID NO: 2157 - protein, 9 aa, synthetic construct
VADTCCDMM

SEQ ID NO: 2158 - protein, 9 aa, synthetic construct
DKHLTCQQA

SEQ ID NO: 2159 - protein, 9 aa, synthetic construct
VEAVLFTAI

SEQ ID NO: 2160 - protein, 9 aa, synthetic construct
VEPCRWYTD

SEQ ID NO: 2161 - protein, 9 aa, synthetic construct
CSQSTCKMT

SEQ ID NO: 2162 - protein, 9 aa, synthetic construct
YIAQPVDMA

SEQ ID NO: 2163 - protein, 9 aa, synthetic construct
HICDMPKGR

SEQ ID NO: 2164 - protein, 9 aa, synthetic construct
TIYPRLPLT

SEQ ID NO: 2165 - protein, 9 aa, synthetic construct
QHSNLTRPC

SEQ ID NO: 2166 - protein, 9 aa, synthetic construct
EKACCFTHL

SEQ ID NO: 2167 - protein, 9 aa, synthetic construct
ASEENLMVK

SEQ ID NO: 2168 - protein, 9 aa, synthetic construct
MKYTAWMDG

SEQ ID NO: 2169 - protein, 9 aa, synthetic construct
VQYACLYEN

SEQ ID NO: 2170 - protein, 9 aa, synthetic construct
EATLNDNHC

SEQ ID NO: 2171 - protein, 9 aa, synthetic construct
ACNLVYADS

SEQ ID NO: 2172 - protein, 9 aa, synthetic construct
NALNIHNLT

SEQ ID NO: 2173 - protein, 9 aa, synthetic construct
CWILHMRSA

SEQ ID NO: 2174 - protein, 9 aa, synthetic construct
GLDVWPWET

SEQ ID NO: 2175 - protein, 9 aa, synthetic construct
QTAEVKACN

SEQ ID NO: 2176 - protein, 9 aa, synthetic construct
VHTCMYGMT

SEQ ID NO: 2177 - protein, 9 aa, synthetic construct
WVMAHNLPS

SEQ ID NO: 2178 - protein, 9 aa, synthetic construct
PEAGYQSEC

SEQ ID NO: 2179 - protein, 9 aa, synthetic construct
HAQMMLSGN

SEQ ID NO: 2180 - protein, 9 aa, synthetic construct
IHFACMVMH

SEQ ID NO: 2181 - protein, 9 aa, synthetic construct
AWQMQVNGP

SEQ ID NO: 2182 - protein, 9 aa, synthetic construct
NFQITEAGQ

SEQ ID NO: 2183 - protein, 9 aa, synthetic construct
CEDSFYKFD

SEQ ID NO: 2184 - protein, 9 aa, synthetic construct
IMTSQMYPA

SEQ ID NO: 2185 - protein, 9 aa, synthetic construct
RSELYGMTL

SEQ ID NO: 2186 - protein, 9 aa, synthetic construct
QTLMVLRNM

SEQ ID NO: 2187 - protein, 9 aa, synthetic construct
EHLYGDIVY

SEQ ID NO: 2188 - protein, 9 aa, synthetic construct
MEQQMKMMF

SEQ ID NO: 2189 - protein, 9 aa, synthetic construct
EFELDTKLC

SEQ ID NO: 2190 - protein, 9 aa, synthetic construct
TINVQNFPT

SEQ ID NO: 2191 - protein, 9 aa, synthetic construct
TQVLEEMAW

SEQ ID NO: 2192 - protein, 9 aa, synthetic construct
TSFSASHWG

SEQ ID NO: 2193 - protein, 9 aa, synthetic construct
QTIYRFNAA

SEQ ID NO: 2194 - protein, 9 aa, synthetic construct
VIDPRHDGY

SEQ ID NO: 2195 - protein, 9 aa, synthetic construct
NEWNQCQAH

SEQ ID NO: 2196 - protein, 9 aa, synthetic construct
TTVNNHDGW

SEQ ID NO: 2197 - protein, 9 aa, synthetic construct
CAYQKHGYV

SEQ ID NO: 2198 - protein, 9 aa, synthetic construct
QTHWQYCRV

SEQ ID NO: 2199 - protein, 9 aa, synthetic construct
SQARICSYC

SEQ ID NO: 2200 - protein, 9 aa, synthetic construct
TNNFRMIAS

SEQ ID NO: 2201 - protein, 9 aa, synthetic construct
TRMQADNMH

SEQ ID NO: 2202 - protein, 9 aa, synthetic construct
NLDNKNEGP

SEQ ID NO: 2203 - protein, 9 aa, synthetic construct
RWVGLWCAD

SEQ ID NO: 2204 - protein, 9 aa, synthetic construct
DRQAMVKTD

SEQ ID NO: 2205 - protein, 9 aa, synthetic construct
NAQHRSQAP

SEQ ID NO: 2206 - protein, 9 aa, synthetic construct
EKLMLHQSV

SEQ ID NO: 2207 - protein, 9 aa, synthetic construct
LVICMQSST

SEQ ID NO: 2208 - protein, 9 aa, synthetic construct
TVHHGFADP

SEQ ID NO: 2209 - protein, 9 aa, synthetic construct
KSTCETDIQ

SEQ ID NO: 2210 - protein, 9 aa, synthetic construct
NQCFHCAWN

SEQ ID NO: 2211 - protein, 9 aa, synthetic construct
NMPMTQNGH

SEQ ID NO: 2212 - protein, 9 aa, synthetic construct
LFGMMPQMK

SEQ ID NO: 2213 - protein, 9 aa, synthetic construct
TIHPFSASR

SEQ ID NO: 2214 - protein, 9 aa, synthetic construct
FGMQDHCVC

SEQ ID NO: 2215 - protein, 9 aa, synthetic construct
FGPLLGTIP

SEQ ID NO: 2216 - protein, 9 aa, synthetic construct
AQGRYASQC

SEQ ID NO: 2217 - protein, 9 aa, synthetic construct
VIHQEWPCT

SEQ ID NO: 2218 - protein, 9 aa, synthetic construct
ETPNNEQTH

SEQ ID NO: 2219 - protein, 9 aa, synthetic construct
QRMYLDHCL

SEQ ID NO: 2220 - protein, 9 aa, synthetic construct
SSGCWYQLG

SEQ ID NO: 2221 - protein, 9 aa, synthetic construct
TNEHQMVPW

SEQ ID NO: 2222 - protein, 9 aa, synthetic construct
RSYVQDFEQ

SEQ ID NO: 2223 - protein, 9 aa, synthetic construct
EIHVKFRYD

SEQ ID NO: 2224 - protein, 9 aa, synthetic construct
GIHAMIVSE

SEQ ID NO: 2225 - protein, 9 aa, synthetic construct
QNEICECYL

SEQ ID NO: 2226 - protein, 9 aa, synthetic construct
IGVCWNYAD

SEQ ID NO: 2227 - protein, 9 aa, synthetic construct
DENGYSAPF

SEQ ID NO: 2228 - protein, 9 aa, synthetic construct
PMIMHQLAG

SEQ ID NO: 2229 - protein, 9 aa, synthetic construct
DASMWGFHT

SEQ ID NO: 2230 - protein, 9 aa, synthetic construct
DLSTFNHWY

SEQ ID NO: 2231 - protein, 9 aa, synthetic construct
QVHQLTESV

SEQ ID NO: 2232 - protein, 9 aa, synthetic construct
EIVNWLERE

SEQ ID NO: 2233 - protein, 9 aa, synthetic construct
IFDWANWHY

SEQ ID NO: 2234 - protein, 9 aa, synthetic construct
CEDILTTAA

SEQ ID NO: 2235 - protein, 9 aa, synthetic construct
NSYPPGQGA

SEQ ID NO: 2236 - protein, 9 aa, synthetic construct
TTSPRMMYQ

SEQ ID NO: 2237 - protein, 9 aa, synthetic construct
TFSFVLDQD

SEQ ID NO: 2238 - protein, 9 aa, synthetic construct
PLDRINMPF

SEQ ID NO: 2239 - protein, 9 aa, synthetic construct
TAHSTMWGW

SEQ ID NO: 2240 - protein, 9 aa, synthetic construct
EIGPDQDTC

SEQ ID NO: 2241 - protein, 9 aa, synthetic construct
ELHITCLYS

SEQ ID NO: 2242 - protein, 9 aa, synthetic construct
MNFLFEVSY

SEQ ID NO: 2243 - protein, 9 aa, synthetic construct
MHGNQHAHK

SEQ ID NO: 2244 - protein, 9 aa, synthetic construct
EFMNHSNAA

SEQ ID NO: 2245 - protein, 9 aa, synthetic construct
ETDPTNRID

SEQ ID NO: 2246 - protein, 9 aa, synthetic construct
GQLVECAAS

SEQ ID NO: 2247 - protein, 9 aa, synthetic construct
NQHDFIRHF

SEQ ID NO: 2248 - protein, 9 aa, synthetic construct
WAETGFCME

SEQ ID NO: 2249 - protein, 9 aa, synthetic construct
VTHQIQRGF

SEQ ID NO: 2250 - protein, 9 aa, synthetic construct
YRDPWVQCS

SEQ ID NO: 2251 - protein, 9 aa, synthetic construct
LCNATWADP

SEQ ID NO: 2252 - protein, 9 aa, synthetic construct
HLWPDTCFQ

SEQ ID NO: 2253 - protein, 9 aa, synthetic construct
TVPEEYLRP

SEQ ID NO: 2254 - protein, 9 aa, synthetic construct
GIGCAETAH

SEQ ID NO: 2255 - protein, 9 aa, synthetic construct
SHDICCKFE

SEQ ID NO: 2256 - protein, 9 aa, synthetic construct
SHNTCESIE

SEQ ID NO: 2257 - protein, 9 aa, synthetic construct
ASDPFQMSM

SEQ ID NO: 2258 - protein, 9 aa, synthetic construct
VFYMGHCCY

SEQ ID NO: 2259 - protein, 9 aa, synthetic construct
YQAQCAMSG

SEQ ID NO: 2260 - protein, 9 aa, synthetic construct
FQWCTQLGC

SEQ ID NO: 2261 - protein, 9 aa, synthetic construct
IMTSWTKIC

SEQ ID NO: 2262 - protein, 9 aa, synthetic construct
MQNAIARHA

SEQ ID NO: 2263 - protein, 9 aa, synthetic construct
SVIHFGSYT

SEQ ID NO: 2264 - protein, 9 aa, synthetic construct
GWQDMMQMP

SEQ ID NO: 2265 - protein, 9 aa, synthetic construct
LCHADGRCS

SEQ ID NO: 2266 - protein, 9 aa, synthetic construct
WLMDNTFPW

SEQ ID NO: 2267 - protein, 9 aa, synthetic construct
LMGYCQKNM

SEQ ID NO: 2268 - protein, 9 aa, synthetic construct
HQNWDNGAP

SEQ ID NO: 2269 - protein, 9 aa, synthetic construct
ERFCELHKA

SEQ ID NO: 2270 - protein, 9 aa, synthetic construct
CSLRTCFGG

SEQ ID NO: 2271 - protein, 9 aa, synthetic construct
PTCAHNYRT

SEQ ID NO: 2272 - protein, 9 aa, synthetic construct
LMDHTCKCD

SEQ ID NO: 2273 - protein, 9 aa, synthetic construct
YTSDAAHQV

SEQ ID NO: 2274 - protein, 9 aa, synthetic construct
SIQKEDNQH

SEQ ID NO: 2275 - protein, 9 aa, synthetic construct
YQFPRESVI

SEQ ID NO: 2276 - protein, 9 aa, synthetic construct
MINGPKCYY

SEQ ID NO: 2277 - protein, 9 aa, synthetic construct
IANQKGLTV

SEQ ID NO: 2278 - protein, 9 aa, synthetic construct
SFISWAELC

SEQ ID NO: 2279 - protein, 9 aa, synthetic construct
RSGYQDWMH

SEQ ID NO: 2280 - protein, 9 aa, synthetic construct
VHLPDTRNV

SEQ ID NO: 2281 - protein, 9 aa, synthetic construct
DSGWHHACQ

SEQ ID NO: 2282 - protein, 9 aa, synthetic construct
FVTTITTHY

SEQ ID NO: 2283 - protein, 9 aa, synthetic construct
YGDANWAVM

SEQ ID NO: 2284 - protein, 9 aa, synthetic construct
PVTILADEY

SEQ ID NO: 2285 - protein, 9 aa, synthetic construct
LNYAGYCRP

SEQ ID NO: 2286 - protein, 9 aa, synthetic construct
MNIYHENLS

SEQ ID NO: 2287 - protein, 9 aa, synthetic construct
VTLTCNTNA

SEQ ID NO: 2288 - protein, 9 aa, synthetic construct
FANASGFWR

SEQ ID NO: 2289 - protein, 9 aa, synthetic construct
ITNDHNHLW

SEQ ID NO: 2290 - protein, 9 aa, synthetic construct
DKLHGQREY

SEQ ID NO: 2291 - protein, 9 aa, synthetic construct
SNTLLCKMV

SEQ ID NO: 2292 - protein, 9 aa, synthetic construct
QISNVTANN

SEQ ID NO: 2293 - protein, 9 aa, synthetic construct
GNQWYQCTA

SEQ ID NO: 2294 - protein, 9 aa, synthetic construct
EIWACYTHG

SEQ ID NO: 2295 - protein, 9 aa, synthetic construct
DWLQEHNGN

SEQ ID NO: 2296 - protein, 9 aa, synthetic construct
ETYKSAEWG

SEQ ID NO: 2297 - protein, 9 aa, synthetic construct
GICMPQEHA

SEQ ID NO: 2298 - protein, 9 aa, synthetic construct
IHFFNLDHC

SEQ ID NO: 2299 - protein, 9 aa, synthetic construct
CQELYGIHD

SEQ ID NO: 2300 - protein, 9 aa, synthetic construct
QHQHVFKDS

SEQ ID NO: 2301 - protein, 9 aa, synthetic construct
AHCVDMDTW

SEQ ID NO: 2302 - protein, 9 aa, synthetic construct
NTADKWRLG

SEQ ID NO: 2303 - protein, 9 aa, synthetic construct
YWHEMLSWP

SEQ ID NO: 2304 - protein, 9 aa, synthetic construct
SACPSENRE

SEQ ID NO: 2305 - protein, 9 aa, synthetic construct
PNWQCLEHD

SEQ ID NO: 2306 - protein, 9 aa, synthetic construct
FLHAVWARP

SEQ ID NO: 2307 - protein, 9 aa, synthetic construct
TNHWDHRSG

SEQ ID NO: 2308 - protein, 9 aa, synthetic construct
SHVCRLSAE

SEQ ID NO: 2309 - protein, 9 aa, synthetic construct
LVCVASSAC

SEQ ID NO: 2310 - protein, 9 aa, synthetic construct
YVGMIPVHP

SEQ ID NO: 2311 - protein, 9 aa, synthetic construct
PQSSHIGDT

SEQ ID NO: 2312 - protein, 9 aa, synthetic construct
GSTIQNRHA

SEQ ID NO: 2313 - protein, 9 aa, synthetic construct
DHLCFPINE

SEQ ID NO: 2314 - protein, 9 aa, synthetic construct
TTLALGDYG

SEQ ID NO: 2315 - protein, 9 aa, synthetic construct
PVHEWKSHQ

SEQ ID NO: 2316 - protein, 9 aa, synthetic construct
KCASYTEPP

SEQ ID NO: 2317 - protein, 9 aa, synthetic construct
EWELCNTTT

SEQ ID NO: 2318 - protein, 9 aa, synthetic construct
EVACNKMMQ

SEQ ID NO: 2319 - protein, 9 aa, synthetic construct
HTMSTTLVY

SEQ ID NO: 2320 - protein, 9 aa, synthetic construct
STEACNYGS

SEQ ID NO: 2321 - protein, 9 aa, synthetic construct
SLMCMEHTY

SEQ ID NO: 2322 - protein, 9 aa, synthetic construct
TTGIYMCDQ

SEQ ID NO: 2323 - protein, 9 aa, synthetic construct
FAMVMHDQP

SEQ ID NO: 2324 - protein, 9 aa, synthetic construct
SRHCCLEFS

SEQ ID NO: 2325 - protein, 9 aa, synthetic construct
TWNIACGRH

SEQ ID NO: 2326 - protein, 9 aa, synthetic construct
EVHFSRITC

SEQ ID NO: 2327 - protein, 9 aa, synthetic construct
FHTNYFWEG

SEQ ID NO: 2328 - protein, 9 aa, synthetic construct
MTEYKVGFY

SEQ ID NO: 2329 - protein, 9 aa, synthetic construct
DICDFCRQF

SEQ ID NO: 2330 - protein, 9 aa, synthetic construct
VTMTVFHPF

SEQ ID NO: 2331 - protein, 9 aa, synthetic construct
HTELDGCYV

SEQ ID NO: 2332 - protein, 9 aa, synthetic construct
AWGMACTTW

SEQ ID NO: 2333 - protein, 9 aa, synthetic construct
WISMTVGAP

SEQ ID NO: 2334 - protein, 9 aa, synthetic construct
FANYCVAMP

SEQ ID NO: 2335 - protein, 9 aa, synthetic construct
NILALCEGT

SEQ ID NO: 2336 - protein, 9 aa, synthetic construct
DRLTHCCEP

SEQ ID NO: 2337 - protein, 9 aa, synthetic construct
HCDYHVCKG

SEQ ID NO: 2338 - protein, 9 aa, synthetic construct
HSVIKESCE

SEQ ID NO: 2339 - protein, 9 aa, synthetic construct
MSMQKMLDN

SEQ ID NO: 2340 - protein, 9 aa, synthetic construct
VLHQCAIEV

SEQ ID NO: 2341 - protein, 9 aa, synthetic construct
ANVTMQHQY

SEQ ID NO: 2342 - protein, 9 aa, synthetic construct
GPVDKAGAN

SEQ ID NO: 2343 - protein, 9 aa, synthetic construct
KEDSKASNP

SEQ ID NO: 2344 - protein, 9 aa, synthetic construct
DTPSYKCNW

SEQ ID NO: 2345 - protein, 9 aa, synthetic construct
LHHFHMKHA

SEQ ID NO: 2346 - protein, 9 aa, synthetic construct
ATNQVIRHM

SEQ ID NO: 2347 - protein, 9 aa, synthetic construct
WSASDPYSM

SEQ ID NO: 2348 - protein, 9 aa, synthetic construct
KEEFVHQQW

SEQ ID NO: 2349 - protein, 9 aa, synthetic construct
CYQDIQHMV

SEQ ID NO: 2350 - protein, 9 aa, synthetic construct
DHMEMCSSA

SEQ ID NO: 2351 - protein, 9 aa, synthetic construct
YPVWVKVQN

SEQ ID NO: 2352 - protein, 9 aa, synthetic construct
LPQQKNEWY

SEQ ID NO: 2353 - protein, 9 aa, synthetic construct
TNAEFYMMR

SEQ ID NO: 2354 - protein, 9 aa, synthetic construct
FWQLIDSAL

SEQ ID NO: 2355 - protein, 9 aa, synthetic construct
YPVGLYQGI

SEQ ID NO: 2356 - protein, 9 aa, synthetic construct
CTFPMHGVG

SEQ ID NO: 2357 - protein, 9 aa, synthetic construct
GDNVCCYPQ

SEQ ID NO: 2358 - protein, 9 aa, synthetic construct
TVGTMINAY

SEQ ID NO: 2359 - protein, 9 aa, synthetic construct
DGSERQNAY

SEQ ID NO: 2360 - protein, 9 aa, synthetic construct
ENFCIYKDS

SEQ ID NO: 2361 - protein, 9 aa, synthetic construct
EHGMKYQHP

SEQ ID NO: 2362 - protein, 9 aa, synthetic construct
GATPFEKMN

SEQ ID NO: 2363 - protein, 9 aa, synthetic construct
HNIWLETGW

SEQ ID NO: 2364 - protein, 9 aa, synthetic construct
TSHQKFMGS

SEQ ID NO: 2365 - protein, 9 aa, synthetic construct
LTGSDGQSS

SEQ ID NO: 2366 - protein, 9 aa, synthetic construct
CEVQCPFDC

SEQ ID NO: 2367 - protein, 9 aa, synthetic construct
QVWACYLPS

SEQ ID NO: 2368 - protein, 9 aa, synthetic construct
WFTFFMAGA

SEQ ID NO: 2369 - protein, 9 aa, synthetic construct
TPKMEICQA

SEQ ID NO: 2370 - protein, 9 aa, synthetic construct
DNNWMYQAD

SEQ ID NO: 2371 - protein, 9 aa, synthetic construct
THALSMKGT

SEQ ID NO: 2372 - protein, 9 aa, synthetic construct
IACLEQATF

SEQ ID NO: 2373 - protein, 9 aa, synthetic construct
GVNWYINSF

SEQ ID NO: 2374 - protein, 9 aa, synthetic construct
TIVDWVHMG

SEQ ID NO: 2375 - protein, 9 aa, synthetic construct
TRLDMAMDA

SEQ ID NO: 2376 - protein, 9 aa, synthetic construct
PEHPVGYTT

SEQ ID NO: 2377 - protein, 9 aa, synthetic construct
TEGLFEWGW

SEQ ID NO: 2378 - protein, 9 aa, synthetic construct
NNPTKTCTT

SEQ ID NO: 2379 - protein, 9 aa, synthetic construct
CLIQQDVVC

SEQ ID NO: 2380 - protein, 9 aa, synthetic construct
LWECYYCNS

SEQ ID NO: 2381 - protein, 9 aa, synthetic construct
PVGIWPSIE

SEQ ID NO: 2382 - protein, 9 aa, synthetic construct
LREFLTVQT

SEQ ID NO: 2383 - protein, 9 aa, synthetic construct
LADGQFMGN

SEQ ID NO: 2384 - protein, 9 aa, synthetic construct
AYQLKVFFN

SEQ ID NO: 2385 - protein, 9 aa, synthetic construct
WVDNLMRHS

SEQ ID NO: 2386 - protein, 9 aa, synthetic construct
NAEFEGCVT

SEQ ID NO: 2387 - protein, 9 aa, synthetic construct
SVTVFWHPG

SEQ ID NO: 2388 - protein, 9 aa, synthetic construct
MHAPANTQD

SEQ ID NO: 2389 - protein, 9 aa, synthetic construct
ASYCIHRSY

SEQ ID NO: 2390 - protein, 9 aa, synthetic construct
TKSEPCLDC

SEQ ID NO: 2391 - protein, 9 aa, synthetic construct
GEVRMSANY

SEQ ID NO: 2392 - protein, 9 aa, synthetic construct
EVYSHDSQY

SEQ ID NO: 2393 - protein, 9 aa, synthetic construct
EQMSNDASY

SEQ ID NO: 2394 - protein, 9 aa, synthetic construct
YPHAYMVTG

SEQ ID NO: 2395 - protein, 9 aa, synthetic construct
SAIPFIRHG

SEQ ID NO: 2396 - protein, 9 aa, synthetic construct
HGGPQVMRS

SEQ ID NO: 2397 - protein, 9 aa, synthetic construct
NVRECHALV

SEQ ID NO: 2398 - protein, 9 aa, synthetic construct
TAGMMQYCD

SEQ ID NO: 2399 - protein, 9 aa, synthetic construct
CEHEMSSYY

SEQ ID NO: 2400 - protein, 9 aa, synthetic construct
HDNGTNKKM

SEQ ID NO: 2401 - protein, 9 aa, synthetic construct
MIPAWNVTQ

SEQ ID NO: 2402 - protein, 9 aa, synthetic construct
AYVSAPRID

SEQ ID NO: 2403 - protein, 9 aa, synthetic construct
IANQNESSW

SEQ ID NO: 2404 - protein, 9 aa, synthetic construct
NTFMLELDS

SEQ ID NO: 2405 - protein, 9 aa, synthetic construct
MITQWMHHR

SEQ ID NO: 2406 - protein, 9 aa, synthetic construct
ADNVQWSEC

SEQ ID NO: 2407 - protein, 9 aa, synthetic construct
SITCPSQTC

SEQ ID NO: 2408 - protein, 9 aa, synthetic construct
FVDPWEWTR

SEQ ID NO: 2409 - protein, 9 aa, synthetic construct
PCLQIGMQQ

SEQ ID NO: 2410 - protein, 9 aa, synthetic construct
APCNKTHSW

SEQ ID NO: 2411 - protein, 9 aa, synthetic construct
DGPSDFKTC

SEQ ID NO: 2412 - protein, 9 aa, synthetic construct
VNAPPSHVE

SEQ ID NO: 2413 - protein, 9 aa, synthetic construct
CPNEMVHYK

SEQ ID NO: 2414 - protein, 9 aa, synthetic construct
VSNEWEASD

SEQ ID NO: 2415 - protein, 9 aa, synthetic construct
TWNPRCWQP

SEQ ID NO: 2416 - protein, 9 aa, synthetic construct
FCEQFGSLC

SEQ ID NO: 2417 - protein, 9 aa, synthetic construct
LQCFLANRE

SEQ ID NO: 2418 - protein, 9 aa, synthetic construct
RMDMHNNST

SEQ ID NO: 2419 - protein, 9 aa, synthetic construct
YCNFIVNAM

SEQ ID NO: 2420 - protein, 9 aa, synthetic construct
PTHTKGNEN

SEQ ID NO: 2421 - protein, 9 aa, synthetic construct
NNFEQRVGH

SEQ ID NO: 2422 - protein, 9 aa, synthetic construct
IMGYLWTQN

SEQ ID NO: 2423 - protein, 9 aa, synthetic construct
YSAWMREFN

SEQ ID NO: 2424 - protein, 9 aa, synthetic construct
DLFNIIQMD

SEQ ID NO: 2425 - protein, 9 aa, synthetic construct
FVSNQTKWE

SEQ ID NO: 2426 - protein, 9 aa, synthetic construct
QCLPLHNHC

SEQ ID NO: 2427 - protein, 9 aa, synthetic construct
GVGFIPTPY

SEQ ID NO: 2428 - protein, 9 aa, synthetic construct
DFVSNWDKF

SEQ ID NO: 2429 - protein, 9 aa, synthetic construct
PQIICMMTV

SEQ ID NO: 2430 - protein, 9 aa, synthetic construct
RPDHEQEST

SEQ ID NO: 2431 - protein, 9 aa, synthetic construct
THLFHKEHA

SEQ ID NO: 2432 - protein, 9 aa, synthetic construct
TGNMAYNCG

SEQ ID NO: 2433 - protein, 9 aa, synthetic construct
MHDQRMYTW

SEQ ID NO: 2434 - protein, 9 aa, synthetic construct
VVGWLTHQA

SEQ ID NO: 2435 - protein, 9 aa, synthetic construct
MILQKNMER

SEQ ID NO: 2436 - protein, 9 aa, synthetic construct
QVEQCLKED

SEQ ID NO: 2437 - protein, 9 aa, synthetic construct
LKISPVNER

SEQ ID NO: 2438 - protein, 9 aa, synthetic construct
AYEFCKNED

SEQ ID NO: 2439 - protein, 9 aa, synthetic construct
IFEHHNRYP

SEQ ID NO: 2440 - protein, 9 aa, synthetic construct
DAYTFINGC

SEQ ID NO: 2441 - protein, 9 aa, synthetic construct
EACLHGFSE

SEQ ID NO: 2442 - protein, 9 aa, synthetic construct
VMGQMAYQY

SEQ ID NO: 2443 - protein, 9 aa, synthetic construct
LNSLVVQGK

SEQ ID NO: 2444 - protein, 9 aa, synthetic construct
HLDPCGWAG

SEQ ID NO: 2445 - protein, 9 aa, synthetic construct
TYSDKIVNT

SEQ ID NO: 2446 - protein, 9 aa, synthetic construct
SFGACYQFA

SEQ ID NO: 2447 - protein, 9 aa, synthetic construct
TQQAFFCVR

SEQ ID NO: 2448 - protein, 9 aa, synthetic construct
EQMWNHHET

SEQ ID NO: 2449 - protein, 9 aa, synthetic construct
VKPADANAG

SEQ ID NO: 2450 - protein, 9 aa, synthetic construct
AIPTFHRAG

SEQ ID NO: 2451 - protein, 9 aa, synthetic construct
NWIVSAKQQ

SEQ ID NO: 2452 - protein, 9 aa, synthetic construct
GMYACQMEW

SEQ ID NO: 2453 - protein, 9 aa, synthetic construct
CGHMSHRSQ

SEQ ID NO: 2454 - protein, 9 aa, synthetic construct
GVCCNHNQI

SEQ ID NO: 2455 - protein, 9 aa, synthetic construct
SLGPVNMTS

SEQ ID NO: 2456 - protein, 9 aa, synthetic construct
TVAGEQMEP

SEQ ID NO: 2457 - protein, 9 aa, synthetic construct
SLLWAVWLD

SEQ ID NO: 2458 - protein, 9 aa, synthetic construct
CAVIGVENP

SEQ ID NO: 2459 - protein, 9 aa, synthetic construct
GVQLIWAGL

SEQ ID NO: 2460 - protein, 9 aa, synthetic construct
HNYASGWVT

SEQ ID NO: 2461 - protein, 9 aa, synthetic construct
DHIWRHEAG

SEQ ID NO: 2462 - protein, 9 aa, synthetic construct
PKLQDVERC

SEQ ID NO: 2463 - protein, 9 aa, synthetic construct
GWPNQSYIC

SEQ ID NO: 2464 - protein, 9 aa, synthetic construct
ENENTWHSG

SEQ ID NO: 2465 - protein, 9 aa, synthetic construct
DKQHTVSAM

SEQ ID NO: 2466 - protein, 9 aa, synthetic construct
PTGFWPYVH

SEQ ID NO: 2467 - protein, 9 aa, synthetic construct
GCTMCYMYC

SEQ ID NO: 2468 - protein, 9 aa, synthetic construct
FTIPQVRYS

SEQ ID NO: 2469 - protein, 9 aa, synthetic construct
AEEIVYESW

SEQ ID NO: 2470 - protein, 9 aa, synthetic construct
TTNAPCEIN

SEQ ID NO: 2471 - protein, 9 aa, synthetic construct
ISDQFGSWI

SEQ ID NO: 2472 - protein, 9 aa, synthetic construct
IVHGTATAE

SEQ ID NO: 2473 - protein, 9 aa, synthetic construct
TATIVKQHW

SEQ ID NO: 2474 - protein, 9 aa, synthetic construct
MICQNMSHT

SEQ ID NO: 2475 - protein, 9 aa, synthetic construct
LIKPANGEC

SEQ ID NO: 2476 - protein, 9 aa, synthetic construct
KDFNSELTN

SEQ ID NO: 2477 - protein, 9 aa, synthetic construct
TPEEPVRGG

SEQ ID NO: 2478 - protein, 9 aa, synthetic construct
NQMFDQNEY

SEQ ID NO: 2479 - protein, 9 aa, synthetic construct
YLQVSMQGY

SEQ ID NO: 2480 - protein, 9 aa, synthetic construct
NHVRNVEQC

SEQ ID NO: 2481 - protein, 9 aa, synthetic construct
TIMHTQRGA

SEQ ID NO: 2482 - protein, 9 aa, synthetic construct
FVSQPGYAV

SEQ ID NO: 2483 - protein, 9 aa, synthetic construct
SMYVMPFWL

SEQ ID NO: 2484 - protein, 9 aa, synthetic construct
VMILSNHGC

SEQ ID NO: 2485 - protein, 9 aa, synthetic construct
VWGPFHLTR

SEQ ID NO: 2486 - protein, 9 aa, synthetic construct
YGYHEDMMC

SEQ ID NO: 2487 - protein, 9 aa, synthetic construct
TSTAESARD

SEQ ID NO: 2488 - protein, 9 aa, synthetic construct
NTAHLYGFD

SEQ ID NO: 2489 - protein, 9 aa, synthetic construct
PFSPKAQVA

SEQ ID NO: 2490 - protein, 9 aa, synthetic construct
INCYSYNEF

SEQ ID NO: 2491 - protein, 9 aa, synthetic construct
MKHMPMTDN

SEQ ID NO: 2492 - protein, 9 aa, synthetic construct
HTHCVLAEH

SEQ ID NO: 2493 - protein, 9 aa, synthetic construct
MVTTLAGND

SEQ ID NO: 2494 - protein, 9 aa, synthetic construct
IYVQKHSDW

SEQ ID NO: 2495 - protein, 9 aa, synthetic construct
PAFLDGVEG

SEQ ID NO: 2496 - protein, 9 aa, synthetic construct
MTPGRHVLS

SEQ ID NO: 2497 - protein, 9 aa, synthetic construct
CDQWLQCYQ

SEQ ID NO: 2498 - protein, 9 aa, synthetic construct
AADSRGVPN

SEQ ID NO: 2499 - protein, 9 aa, synthetic construct
AWCSFQHIK

SEQ ID NO: 2500 - protein, 9 aa, synthetic construct
MQMAYYQSH

SEQ ID NO: 2501 - protein, 9 aa, synthetic construct
QKVCHMTAI

SEQ ID NO: 2502 - protein, 9 aa, synthetic construct
TNWRTDVNG

SEQ ID NO: 2503 - protein, 9 aa, synthetic construct
EINEWTIAN

SEQ ID NO: 2504 - protein, 9 aa, synthetic construct
FTEFYQAHD

SEQ ID NO: 2505 - protein, 9 aa, synthetic construct
SEKCWPDYQ

SEQ ID NO: 2506 - protein, 9 aa, synthetic construct
GYTGNDESS

SEQ ID NO: 2507 - protein, 9 aa, synthetic construct
WFSQNGWAH

SEQ ID NO: 2508 - protein, 9 aa, synthetic construct
QCALETPIP

SEQ ID NO: 2509 - protein, 9 aa, synthetic construct
DEILRYSFQ

SEQ ID NO: 2510 - protein, 9 aa, synthetic construct
KAVITESAC

SEQ ID NO: 2511 - protein, 9 aa, synthetic construct
ALSAWGMPS

SEQ ID NO: 2512 - protein, 9 aa, synthetic construct
VIWSVEHAE

SEQ ID NO: 2513 - protein, 9 aa, synthetic construct
NAHLKMTAS

SEQ ID NO: 2514 - protein, 9 aa, synthetic construct
HKKRARQRP

SEQ ID NO: 2515 - protein, 9 aa, synthetic construct
HKKKKKQEP

SEQ ID NO: 2516 - protein, 9 aa, synthetic construct
HKKKARTRP

SEQ ID NO: 2517 - protein, 9 aa, synthetic construct
HKKRKRVRP

SEQ ID NO: 2518 - protein, 9 aa, synthetic construct
HKRRARVQP

SEQ ID NO: 2519 - protein, 9 aa, synthetic construct
AKRRKKRRN

SEQ ID NO: 2520 - protein, 9 aa, synthetic construct
HKRKKKRRT

SEQ ID NO: 2521 - protein, 9 aa, synthetic construct
HKRRARYRP

SEQ ID NO: 2522 - protein, 9 aa, synthetic construct
HKKKGRMRP

SEQ ID NO: 2523 - protein, 9 aa, synthetic construct
HKRKKKRRP

SEQ ID NO: 2524 - protein, 9 aa, synthetic construct
HKKRKKQRV

SEQ ID NO: 2525 - protein, 9 aa, synthetic construct
TKKRKRICP

SEQ ID NO: 2526 - protein, 9 aa, synthetic construct
HRKRGRVKP

SEQ ID NO: 2527 - protein, 9 aa, synthetic construct
HKKKARQKT

SEQ ID NO: 2528 - protein, 9 aa, synthetic construct
HKKRKRLRS

SEQ ID NO: 2529 - protein, 9 aa, synthetic construct
AKKKKRMRP

SEQ ID NO: 2530 - protein, 9 aa, synthetic construct
HKKRYKQRP

SEQ ID NO: 2531 - protein, 9 aa, synthetic construct
HKKRGREQP

SEQ ID NO: 2532 - protein, 9 aa, synthetic construct
HRRRKKQRP

SEQ ID NO: 2533 - protein, 9 aa, synthetic construct
HKKKKKQKP

SEQ ID NO: 2534 - protein, 9 aa, synthetic construct
HDRKKKFRP

SEQ ID NO: 2535 - protein, 9 aa, synthetic construct
HKKRKRKRP

SEQ ID NO: 2536 - protein, 9 aa, synthetic construct
HKRKKKLET

SEQ ID NO: 2537 - protein, 9 aa, synthetic construct
HKKRGRTRW

SEQ ID NO: 2538 - protein, 9 aa, synthetic construct
HCRRARSYP

SEQ ID NO: 2539 - protein, 9 aa, synthetic construct
HKKKAKQRP

SEQ ID NO: 2540 - protein, 9 aa, synthetic construct
HKKRARHKD

SEQ ID NO: 2541 - protein, 9 aa, synthetic construct
HCKRKKVRS

SEQ ID NO: 2542 - protein, 9 aa, synthetic construct
HSRRARVQP

SEQ ID NO: 2543 - protein, 9 aa, synthetic construct
TKKRKRTQW

SEQ ID NO: 2544 - protein, 9 aa, synthetic construct
HKKRKRMKS

SEQ ID NO: 2545 - protein, 9 aa, synthetic construct
HKKRKRQKW

SEQ ID NO: 2546 - protein, 9 aa, synthetic construct
HDKKARSKP

SEQ ID NO: 2547 - protein, 9 aa, synthetic construct
HKKRKRQRP

SEQ ID NO: 2548 - protein, 9 aa, synthetic construct
HCRRARMRC

SEQ ID NO: 2549 - protein, 9 aa, synthetic construct
HKKKKRVAS

SEQ ID NO: 2550 - protein, 9 aa, synthetic construct
HKRKKRQAY

SEQ ID NO: 2551 - protein, 9 aa, synthetic construct
APKRKKFRP

SEQ ID NO: 2552 - protein, 9 aa, synthetic construct
HLRKAKTAP

SEQ ID NO: 2553 - protein, 9 aa, synthetic construct
AKKKKKFRP

SEQ ID NO: 2554 - protein, 9 aa, synthetic construct
HKKKGRMKP

SEQ ID NO: 2555 - protein, 9 aa, synthetic construct
HDRRGKQRP

SEQ ID NO: 2556 - protein, 9 aa, synthetic construct
HLPRQRVKP

SEQ ID NO: 2557 - protein, 9 aa, synthetic construct
TDKKKKQCW

SEQ ID NO: 2558 - protein, 9 aa, synthetic construct
TKKKKKHCP

SEQ ID NO: 2559 - protein, 9 aa, synthetic construct
SKKKGRERP

SEQ ID NO: 2560 - protein, 9 aa, synthetic construct
HDKRGKMKP

SEQ ID NO: 2561 - protein, 9 aa, synthetic construct
KLKRARTQP

SEQ ID NO: 2562 - protein, 9 aa, synthetic construct
MKKRKRQAW

SEQ ID NO: 2563 - protein, 9 aa, synthetic construct
HLKRAKFRT

SEQ ID NO: 2564 - protein, 9 aa, synthetic construct
HKKRKREKP

SEQ ID NO: 2565 - protein, 9 aa, synthetic construct
MKKRKKQRN

SEQ ID NO: 2566 - protein, 9 aa, synthetic construct
HDKKKRQRE

SEQ ID NO: 2567 - protein, 9 aa, synthetic construct
HRRRKKQKC

SEQ ID NO: 2568 - protein, 9 aa, synthetic construct
HRRRKRLQP

SEQ ID NO: 2569 - protein, 9 aa, synthetic construct
HGRRAKVRP

SEQ ID NO: 2570 - protein, 9 aa, synthetic construct
HKKKKRANP

SEQ ID NO: 2571 - protein, 9 aa, synthetic construct
HKRKKKTRP

SEQ ID NO: 2572 - protein, 9 aa, synthetic construct
AKRRARTKP

SEQ ID NO: 2573 - protein, 9 aa, synthetic construct
HKKRLRMRP

SEQ ID NO: 2574 - protein, 9 aa, synthetic construct
AKKRKRSRP

SEQ ID NO: 2575 - protein, 9 aa, synthetic construct
HPKRAKAKP

SEQ ID NO: 2576 - protein, 9 aa, synthetic construct
HKKRKRHKP

SEQ ID NO: 2577 - protein, 9 aa, synthetic construct
HRRRKKLKN

SEQ ID NO: 2578 - protein, 9 aa, synthetic construct
HDKKKRVKP

SEQ ID NO: 2579 - protein, 9 aa, synthetic construct
HQKKKRLQP

SEQ ID NO: 2580 - protein, 9 aa, synthetic construct
HKKRARFQS

SEQ ID NO: 2581 - protein, 9 aa, synthetic construct
HKRKKKIKP

SEQ ID NO: 2582 - protein, 9 aa, synthetic construct
HKKRKRQEP

SEQ ID NO: 2583 - protein, 9 aa, synthetic construct
HKKRARHRP

SEQ ID NO: 2584 - protein, 9 aa, synthetic construct
HKKRLKHIW

SEQ ID NO: 2585 - protein, 9 aa, synthetic construct
HKKKKRMRP

SEQ ID NO: 2586 - protein, 9 aa, synthetic construct
HCKKKRVRY

SEQ ID NO: 2587 - protein, 9 aa, synthetic construct
HKKRKRSGN

SEQ ID NO: 2588 - protein, 9 aa, synthetic construct
HKKKKKARP

SEQ ID NO: 2589 - protein, 9 aa, synthetic construct
ARKRKKLKP

SEQ ID NO: 2590 - protein, 9 aa, synthetic construct
SKKKGRQKP

SEQ ID NO: 2591 - protein, 9 aa, synthetic construct
HKKRDKQRP

SEQ ID NO: 2592 - protein, 9 aa, synthetic construct
HKKRKRMRY

SEQ ID NO: 2593 - protein, 9 aa, synthetic construct
HKKRKRHRT

SEQ ID NO: 2594 - protein, 9 aa, synthetic construct
HPKRKKLAP

SEQ ID NO: 2595 - protein, 9 aa, synthetic construct
HKRRARQRP

SEQ ID NO: 2596 - protein, 9 aa, synthetic construct
HKRKKRTRC

SEQ ID NO: 2597 - protein, 9 aa, synthetic construct
HDKRKRHRW

SEQ ID NO: 2598 - protein, 9 aa, synthetic construct
QPKRKRVAP

SEQ ID NO: 2599 - protein, 9 aa, synthetic construct
CDKKKKTRP

SEQ ID NO: 2600 - protein, 9 aa, synthetic construct
HKRRKKLRP

SEQ ID NO: 2601 - protein, 9 aa, synthetic construct
HKRKARTRP

SEQ ID NO: 2602 - protein, 9 aa, synthetic construct
HRKKLKSKP

SEQ ID NO: 2603 - protein, 9 aa, synthetic construct
HKKKLRVRP

SEQ ID NO: 2604 - protein, 9 aa, synthetic construct
MDKKGKTCW

SEQ ID NO: 2605 - protein, 9 aa, synthetic construct
HKKRARVEP

SEQ ID NO: 2606 - protein, 9 aa, synthetic construct
MKKRGRTPP

SEQ ID NO: 2607 - protein, 9 aa, synthetic construct
HKRRKRTRN

SEQ ID NO: 2608 - protein, 9 aa, synthetic construct
AKKKKREKL

SEQ ID NO: 2609 - protein, 9 aa, synthetic construct
HCRRAKQRE

SEQ ID NO: 2610 - protein, 9 aa, synthetic construct
HKKKLRMRW

SEQ ID NO: 2611 - protein, 9 aa, synthetic construct
HPKRKRTRD

SEQ ID NO: 2612 - protein, 9 aa, synthetic construct
HKKKSKQKP

SEQ ID NO: 2613 - protein, 9 aa, synthetic construct
HQRRKKKKP

SEQ ID NO: 2614 - protein, 9 aa, synthetic construct
TKKRKRVKA

SEQ ID NO: 2615 - protein, 9 aa, synthetic construct
HKKRLRVKP

SEQ ID NO: 2616 - protein, 9 aa, synthetic construct
HKKKKKVRP

SEQ ID NO: 2617 - protein, 9 aa, synthetic construct
TKKRKRVRS

SEQ ID NO: 2618 - protein, 9 aa, synthetic construct
HCRRGKVRC

SEQ ID NO: 2619 - protein, 9 aa, synthetic construct
HKRRKRMRP

SEQ ID NO: 2620 - protein, 9 aa, synthetic construct
HKKKKRQAW

SEQ ID NO: 2621 - protein, 9 aa, synthetic construct
HKKKKRLRP

SEQ ID NO: 2622 - protein, 9 aa, synthetic construct
HKKKKKRCS

SEQ ID NO: 2623 - protein, 9 aa, synthetic construct
HDRKKKTKP

SEQ ID NO: 2624 - protein, 9 aa, synthetic construct
HKKRKRHGP

SEQ ID NO: 2625 - protein, 9 aa, synthetic construct
HKRRARKRP

SEQ ID NO: 2626 - protein, 9 aa, synthetic construct
HKKKKKVRC

SEQ ID NO: 2627 - protein, 9 aa, synthetic construct
HKRKKRQRP

SEQ ID NO: 2628 - protein, 9 aa, synthetic construct
HKKRKRDRP

SEQ ID NO: 2629 - protein, 9 aa, synthetic construct
HKKKAKFQP

SEQ ID NO: 2630 - protein, 9 aa, synthetic construct
HDKRKRTRN

SEQ ID NO: 2631 - protein, 9 aa, synthetic construct
HKKKKRFNP

SEQ ID NO: 2632 - protein, 9 aa, synthetic construct
TKKKKRQKW

SEQ ID NO: 2633 - protein, 9 aa, synthetic construct
ALKKKRQKP

SEQ ID NO: 2634 - protein, 9 aa, synthetic construct
HKKRLRFKP

SEQ ID NO: 2635 - protein, 9 aa, synthetic construct
AKKKKRQRP

SEQ ID NO: 2636 - protein, 9 aa, synthetic construct
HRKRAKVAP

SEQ ID NO: 2637 - protein, 9 aa, synthetic construct
HCKKKKQIP

SEQ ID NO: 2638 - protein, 9 aa, synthetic construct
AKKRKRQKW

SEQ ID NO: 2639 - protein, 9 aa, synthetic construct
HKKKGKHRV

SEQ ID NO: 2640 - protein, 9 aa, synthetic construct
HKKRDRMCS

SEQ ID NO: 2641 - protein, 9 aa, synthetic construct
HKKRARLKP

SEQ ID NO: 2642 - protein, 9 aa, synthetic construct
AKRRKKAKP

SEQ ID NO: 2643 - protein, 9 aa, synthetic construct
TLKRKRTKP

SEQ ID NO: 2644 - protein, 9 aa, synthetic construct
HKKRARLAY

SEQ ID NO: 2645 - protein, 9 aa, synthetic construct
HKKRKRRRW

SEQ ID NO: 2646 - protein, 9 aa, synthetic construct
HLKKKRKQN

SEQ ID NO: 2647 - protein, 9 aa, synthetic construct
HKKRKKLRP

SEQ ID NO: 2648 - protein, 9 aa, synthetic construct
HKRKKKFGP

SEQ ID NO: 2649 - protein, 9 aa, synthetic construct
EKKKSKMQP

SEQ ID NO: 2650 - protein, 9 aa, synthetic construct
HCKRAKTRP

SEQ ID NO: 2651 - protein, 9 aa, synthetic construct
TKKKKRHKN

SEQ ID NO: 2652 - protein, 9 aa, synthetic construct
HKRRKKERW

SEQ ID NO: 2653 - protein, 9 aa, synthetic construct
HKRRGKQRP

SEQ ID NO: 2654 - protein, 9 aa, synthetic construct
HKKRKRTKP

SEQ ID NO: 2655 - protein, 9 aa, synthetic construct
AKKRAKQRP

SEQ ID NO: 2656 - protein, 9 aa, synthetic construct
HKKKGRTRP

SEQ ID NO: 2657 - protein, 9 aa, synthetic construct
HCRRKKVRW

SEQ ID NO: 2658 - protein, 9 aa, synthetic construct
HKKRKRFKP

SEQ ID NO: 2659 - protein, 9 aa, synthetic construct
HKKKKRHKP

SEQ ID NO: 2660 - protein, 9 aa, synthetic construct
HEKRKRFKP

SEQ ID NO: 2661 - protein, 9 aa, synthetic construct
HKKKKRTRV

SEQ ID NO: 2662 - protein, 9 aa, synthetic construct
HPRKAKCRD

SEQ ID NO: 2663 - protein, 9 aa, synthetic construct
HKKRAKQRT

SEQ ID NO: 2664 - protein, 9 aa, synthetic construct
HKKRARHQT

SEQ ID NO: 2665 - protein, 9 aa, synthetic construct
HKKRKRHRL

SEQ ID NO: 2666 - protein, 9 aa, synthetic construct
HRRKAKTRT

SEQ ID NO: 2667 - protein, 9 aa, synthetic construct
HKKKKRTYW

SEQ ID NO: 2668 - protein, 9 aa, synthetic construct
HKKRKRLRC

SEQ ID NO: 2669 - protein, 9 aa, synthetic construct
HKKRKKQRP

SEQ ID NO: 2670 - protein, 9 aa, synthetic construct
TKKRKRLRP

SEQ ID NO: 2671 - protein, 9 aa, synthetic construct
HDKRKRVKP

SEQ ID NO: 2672 - protein, 9 aa, synthetic construct
HDRRKKTAP

SEQ ID NO: 2673 - protein, 9 aa, synthetic construct
HKRKKKVRP

SEQ ID NO: 2674 - protein, 9 aa, synthetic construct
AKKKKRQKP

SEQ ID NO: 2675 - protein, 9 aa, synthetic construct
HLRKKRLRP

SEQ ID NO: 2676 - protein, 9 aa, synthetic construct
HKKRKRQKP

SEQ ID NO: 2677 - protein, 9 aa, synthetic construct
HKRKKRQRW

SEQ ID NO: 2678 - protein, 9 aa, synthetic construct
KDKKKRVRP

SEQ ID NO: 2679 - protein, 9 aa, synthetic construct
HDRRKKFKH

SEQ ID NO: 2680 - protein, 9 aa, synthetic construct
TKKKKRMRP

SEQ ID NO: 2681 - protein, 9 aa, synthetic construct
HKRRKRRGW

SEQ ID NO: 2682 - protein, 9 aa, synthetic construct
HKRKSRTRP

SEQ ID NO: 2683 - protein, 9 aa, synthetic construct
HRKRKRVCP

SEQ ID NO: 2684 - protein, 9 aa, synthetic construct
MKKRKRQRP

SEQ ID NO: 2685 - protein, 9 aa, synthetic construct
HKKKKKQRP

SEQ ID NO: 2686 - protein, 9 aa, synthetic construct
HRKKKRVKS

SEQ ID NO: 2687 - protein, 9 aa, synthetic construct
TKKRARQRA

SEQ ID NO: 2688 - protein, 9 aa, synthetic construct
MKKKGRVRP

SEQ ID NO: 2689 - protein, 9 aa, synthetic construct
HRKRGRMRA

SEQ ID NO: 2690 - protein, 9 aa, synthetic construct
MKKRKRVVP

SEQ ID NO: 2691 - protein, 9 aa, synthetic construct
HKKRKRLRY

SEQ ID NO: 2692 - protein, 9 aa, synthetic construct
HCKKKRQRP

SEQ ID NO: 2693 - protein, 9 aa, synthetic construct
HDRKKKVQP

SEQ ID NO: 2694 - protein, 9 aa, synthetic construct
HCKRAKTGP

SEQ ID NO: 2695 - protein, 9 aa, synthetic construct
TPKRKRLRS

SEQ ID NO: 2696 - protein, 9 aa, synthetic construct
HKKRGRVRP

SEQ ID NO: 2697 - protein, 9 aa, synthetic construct
TKKRKRQRY

SEQ ID NO: 2698 - protein, 9 aa, synthetic construct
MRRRGRSRP

SEQ ID NO: 2699 - protein, 9 aa, synthetic construct
HKKKKKQCP

SEQ ID NO: 2700 - protein, 9 aa, synthetic construct
HKRKKKDQT

SEQ ID NO: 2701 - protein, 9 aa, synthetic construct
HCKKARFRP

SEQ ID NO: 2702 - protein, 9 aa, synthetic construct
HDKRLKQRW

SEQ ID NO: 2703 - protein, 9 aa, synthetic construct
HLKRKRTRE

SEQ ID NO: 2704 - protein, 9 aa, synthetic construct
HKKRKRTRW

SEQ ID NO: 2705 - protein, 9 aa, synthetic construct
HKRKKRFNV

SEQ ID NO: 2706 - protein, 9 aa, synthetic construct
CDKKLRFFP

SEQ ID NO: 2707 - protein, 9 aa, synthetic construct
KKRRARQGP

SEQ ID NO: 2708 - protein, 9 aa, synthetic construct
TKKRSKVRS

SEQ ID NO: 2709 - protein, 9 aa, synthetic construct
HDKRLRHKE

SEQ ID NO: 2710 - protein, 9 aa, synthetic construct
AKKKKKVWW

SEQ ID NO: 2711 - protein, 9 aa, synthetic construct
HKKKKRLRW

SEQ ID NO: 2712 - protein, 9 aa, synthetic construct
HKKRLKQKN

SEQ ID NO: 2713 - protein, 9 aa, synthetic construct
HKKRKRLRV

SEQ ID NO: 2714 - protein, 9 aa, synthetic construct
HKKKKKERP

SEQ ID NO: 2715 - protein, 9 aa, synthetic construct
HKKRKRSQP

SEQ ID NO: 2716 - protein, 9 aa, synthetic construct
HKKRARVRP

SEQ ID NO: 2717 - protein, 9 aa, synthetic construct
HKKKKKFRT

SEQ ID NO: 2718 - protein, 9 aa, synthetic construct
AKKKGKLRQ

SEQ ID NO: 2719 - protein, 9 aa, synthetic construct
QKKKGRDRS

SEQ ID NO: 2720 - protein, 9 aa, synthetic construct
HERKKKLRP

SEQ ID NO: 2721 - protein, 9 aa, synthetic construct
HKRKKKTKE

SEQ ID NO: 2722 - protein, 9 aa, synthetic construct
HKKRKKVKP

SEQ ID NO: 2723 - protein, 9 aa, synthetic construct
HKKRARLRW

SEQ ID NO: 2724 - protein, 9 aa, synthetic construct
MKKKKRVRP

SEQ ID NO: 2725 - protein, 9 aa, synthetic construct
HKKRARLRS

SEQ ID NO: 2726 - protein, 9 aa, synthetic construct
HQRRAKTRP

SEQ ID NO: 2727 - protein, 9 aa, synthetic construct
HRKKLRQKP

SEQ ID NO: 2728 - protein, 9 aa, synthetic construct
HDKKKKMMP

SEQ ID NO: 2729 - protein, 9 aa, synthetic construct
HKRRKRICP

SEQ ID NO: 2730 - protein, 9 aa, synthetic construct
HRRKKKQKM

SEQ ID NO: 2731 - protein, 9 aa, synthetic construct
TRKRSRVIN

SEQ ID NO: 2732 - protein, 9 aa, synthetic construct
HKKRKKRRW

SEQ ID NO: 2733 - protein, 9 aa, synthetic construct
HKKRKRRVP

SEQ ID NO: 2734 - protein, 9 aa, synthetic construct
HKKRKRMRP

SEQ ID NO: 2735 - protein, 9 aa, synthetic construct
TKRRARVRT

SEQ ID NO: 2736 - protein, 9 aa, synthetic construct
HKKRKRVAP

SEQ ID NO: 2737 - protein, 9 aa, synthetic construct
HPKRKRHRP

SEQ ID NO: 2738 - protein, 9 aa, synthetic construct
SKKKKRFAP

SEQ ID NO: 2739 - protein, 9 aa, synthetic construct
TLRKKRQRP

SEQ ID NO: 2740 - protein, 9 aa, synthetic construct
KKRKKRKGN

SEQ ID NO: 2741 - protein, 9 aa, synthetic construct
HKKRKRTRP

SEQ ID NO: 2742 - protein, 9 aa, synthetic construct
HKKRKRHNP

SEQ ID NO: 2743 - protein, 9 aa, synthetic construct
HKKKGRHQC

SEQ ID NO: 2744 - protein, 9 aa, synthetic construct
HKKKKRSRP

SEQ ID NO: 2745 - protein, 9 aa, synthetic construct
HDKRKKQKP

SEQ ID NO: 2746 - protein, 9 aa, synthetic construct
HKKRKKQRE

SEQ ID NO: 2747 - protein, 9 aa, synthetic construct
HKKKGKVKP

SEQ ID NO: 2748 - protein, 9 aa, synthetic construct
HLKKKKKQP

SEQ ID NO: 2749 - protein, 9 aa, synthetic construct
HPKKKKLRP

SEQ ID NO: 2750 - protein, 9 aa, synthetic construct
HRKRAKVRC

SEQ ID NO: 2751 - protein, 9 aa, synthetic construct
HDKKKRLRP

SEQ ID NO: 2752 - protein, 9 aa, synthetic construct
TKKRKKDKE

SEQ ID NO: 2753 - protein, 9 aa, synthetic construct
HKKRARQRY

SEQ ID NO: 2754 - protein, 9 aa, synthetic construct
MKKRARLRC

SEQ ID NO: 2755 - protein, 9 aa, synthetic construct
HKKRARFRL

SEQ ID NO: 2756 - protein, 9 aa, synthetic construct
HKKRGRIRP

SEQ ID NO: 2757 - protein, 9 aa, synthetic construct
HQKKCKTCP

SEQ ID NO: 2758 - protein, 9 aa, synthetic construct
HPKRARTRP

SEQ ID NO: 2759 - protein, 9 aa, synthetic construct
MKKKKRQCN

SEQ ID NO: 2760 - protein, 9 aa, synthetic construct
HLKKKRWRW

SEQ ID NO: 2761 - protein, 9 aa, synthetic construct
HKKKKRLKN

SEQ ID NO: 2762 - protein, 9 aa, synthetic construct
HKKRKRART

SEQ ID NO: 2763 - protein, 9 aa, synthetic construct
HKKRKKMRP

SEQ ID NO: 2764 - protein, 9 aa, synthetic construct
HKRRKRRRS

SEQ ID NO: 2765 - protein, 9 aa, synthetic construct
HQRRKKLRN

SEQ ID NO: 2766 - protein, 9 aa, synthetic construct
HKRKKRLRN

SEQ ID NO: 2767 - protein, 9 aa, synthetic construct
HKKRKRMKP

SEQ ID NO: 2768 - protein, 9 aa, synthetic construct
HKKKKRVPY

SEQ ID NO: 2769 - protein, 9 aa, synthetic construct
KDKKKKLKP

SEQ ID NO: 2770 - protein, 9 aa, synthetic construct
AKKKARMKW

SEQ ID NO: 2771 - protein, 9 aa, synthetic construct
TCKKAKMCP

SEQ ID NO: 2772 - protein, 9 aa, synthetic construct
HKKKLKMWP

SEQ ID NO: 2773 - protein, 9 aa, synthetic construct
HDRKKKQIW

SEQ ID NO: 2774 - protein, 9 aa, synthetic construct
HKKKKRMCP

SEQ ID NO: 2775 - protein, 9 aa, synthetic construct
HKKKLRQRP

SEQ ID NO: 2776 - protein, 9 aa, synthetic construct
TKKRKRQRP

SEQ ID NO: 2777 - protein, 9 aa, synthetic construct
AKKRKRQAP

SEQ ID NO: 2778 - protein, 9 aa, synthetic construct
KQKKKREWP

SEQ ID NO: 2779 - protein, 9 aa, synthetic construct
AKKRARQKP

SEQ ID NO: 2780 - protein, 9 aa, synthetic construct
HCRKKKTRY

SEQ ID NO: 2781 - protein, 9 aa, synthetic construct
AKKRLKVQP

SEQ ID NO: 2782 - protein, 9 aa, synthetic construct
HCKKKKQRP

SEQ ID NO: 2783 - protein, 9 aa, synthetic construct
KKKRKKRRP

SEQ ID NO: 2784 - protein, 9 aa, synthetic construct
ADRRAKVRP

SEQ ID NO: 2785 - protein, 9 aa, synthetic construct
HGKKGRVRP

SEQ ID NO: 2786 - protein, 9 aa, synthetic construct
HKRKAKVRN

SEQ ID NO: 2787 - protein, 9 aa, synthetic construct
HLKKKRRKT

SEQ ID NO: 2788 - protein, 9 aa, synthetic construct
HEKRKRERP

SEQ ID NO: 2789 - protein, 9 aa, synthetic construct
HCRRKKERP

SEQ ID NO: 2790 - protein, 9 aa, synthetic construct
TKKRKRTAP

SEQ ID NO: 2791 - protein, 9 aa, synthetic construct
HLRRARLKN

SEQ ID NO: 2792 - protein, 9 aa, synthetic construct
HKRRKRHRW

SEQ ID NO: 2793 - protein, 9 aa, synthetic construct
HKRKKRQQQ

SEQ ID NO: 2794 - protein, 9 aa, synthetic construct
HDRRGKTQP

SEQ ID NO: 2795 - protein, 9 aa, synthetic construct
TDKRGKQKP

SEQ ID NO: 2796 - protein, 9 aa, synthetic construct
AKKKKRHKM

SEQ ID NO: 2797 - protein, 9 aa, synthetic construct
HKRKKKMRP

SEQ ID NO: 2798 - protein, 9 aa, synthetic construct
HKKRKRLRH

SEQ ID NO: 2799 - protein, 9 aa, synthetic construct
HCKKARRKP

SEQ ID NO: 2800 - protein, 9 aa, synthetic construct
HRKRLRQRP

SEQ ID NO: 2801 - protein, 9 aa, synthetic construct
HKKRGRVKP

SEQ ID NO: 2802 - protein, 9 aa, synthetic construct
HKKRKKDKS

SEQ ID NO: 2803 - protein, 9 aa, synthetic construct
MKKRKRHQH

SEQ ID NO: 2804 - protein, 9 aa, synthetic construct
HKKRKKVKD

SEQ ID NO: 2805 - protein, 9 aa, synthetic construct
HDKRARQRP

SEQ ID NO: 2806 - protein, 9 aa, synthetic construct
HDKRKRVWP

SEQ ID NO: 2807 - protein, 9 aa, synthetic construct
AKKRKKHRP

SEQ ID NO: 2808 - protein, 9 aa, synthetic construct
TRKKKRVKP

SEQ ID NO: 2809 - protein, 9 aa, synthetic construct
HKRRKRHRP

SEQ ID NO: 2810 - protein, 9 aa, synthetic construct
HKKRLRLRP

SEQ ID NO: 2811 - protein, 9 aa, synthetic construct
HKKKKKLRI

SEQ ID NO: 2812 - protein, 9 aa, synthetic construct
HRKRLRSRP

SEQ ID NO: 2813 - protein, 9 aa, synthetic construct
HKRRKKERP

SEQ ID NO: 2814 - protein, 9 aa, synthetic construct
HKRRKRLRT

SEQ ID NO: 2815 - protein, 9 aa, synthetic construct
HKKRKRHRN

SEQ ID NO: 2816 - protein, 9 aa, synthetic construct
HKRRKKLRW

SEQ ID NO: 2817 - protein, 9 aa, synthetic construct
HKKRSKQRP

SEQ ID NO: 2818 - protein, 9 aa, synthetic construct
HDKRKRVRP

SEQ ID NO: 2819 - protein, 9 aa, synthetic construct
HKKKKRVKP

SEQ ID NO: 2820 - protein, 9 aa, synthetic construct
IKRKKRHYP

SEQ ID NO: 2821 - protein, 9 aa, synthetic construct
HRKRAKQQP

SEQ ID NO: 2822 - protein, 9 aa, synthetic construct
HDKRKKMRD

SEQ ID NO: 2823 - protein, 9 aa, synthetic construct
HDKKLRFRW

SEQ ID NO: 2824 - protein, 9 aa, synthetic construct
AKKRSRWRC

SEQ ID NO: 2825 - protein, 9 aa, synthetic construct
HKRRKRQKP

SEQ ID NO: 2826 - protein, 9 aa, synthetic construct
HERKKRVRP

SEQ ID NO: 2827 - protein, 9 aa, synthetic construct
HKKRKRTRV

SEQ ID NO: 2828 - protein, 9 aa, synthetic construct
HKKRLRVRP

SEQ ID NO: 2829 - protein, 9 aa, synthetic construct
HKRKKKHRP

SEQ ID NO: 2830 - protein, 9 aa, synthetic construct
HKKRARHRS

SEQ ID NO: 2831 - protein, 9 aa, synthetic construct
HRKRKRLRP

SEQ ID NO: 2832 - protein, 9 aa, synthetic construct
HKKRKRTYY

SEQ ID NO: 2833 - protein, 9 aa, synthetic construct
YKKKKKVCS

SEQ ID NO: 2834 - protein, 9 aa, synthetic construct
KKKRKRQRW

SEQ ID NO: 2835 - protein, 9 aa, synthetic construct
HKKRKRVKP

SEQ ID NO: 2836 - protein, 9 aa, synthetic construct
HKKRKKVRS

SEQ ID NO: 2837 - protein, 9 aa, synthetic construct
HDKRKKMQP

SEQ ID NO: 2838 - protein, 9 aa, synthetic construct
TKKKAKQKP

SEQ ID NO: 2839 - protein, 9 aa, synthetic construct
HKRKKRWRW

SEQ ID NO: 2840 - protein, 9 aa, synthetic construct
HKKRKRFRP

SEQ ID NO: 2841 - protein, 9 aa, synthetic construct
QQRKARHRP

SEQ ID NO: 2842 - protein, 9 aa, synthetic construct
HCRKDKQQP

SEQ ID NO: 2843 - protein, 9 aa, synthetic construct
HKRKLKWKP

SEQ ID NO: 2844 - protein, 9 aa, synthetic construct
HKKKKRQKP

SEQ ID NO: 2845 - protein, 9 aa, synthetic construct
HKKRKRTCP

SEQ ID NO: 2846 - protein, 9 aa, synthetic construct
TKKKSKTRP

SEQ ID NO: 2847 - protein, 9 aa, synthetic construct
HKKRGRMRP

SEQ ID NO: 2848 - protein, 9 aa, synthetic construct
HKRKKKLKC

SEQ ID NO: 2849 - protein, 9 aa, synthetic construct
HKKKKRFKP

SEQ ID NO: 2850 - protein, 9 aa, synthetic construct
HRKRARLKP

SEQ ID NO: 2851 - protein, 9 aa, synthetic construct
HRKKGKQRP

SEQ ID NO: 2852 - protein, 9 aa, synthetic construct
TRKRKRMRD

SEQ ID NO: 2853 - protein, 9 aa, synthetic construct
HQKKKRQLP

SEQ ID NO: 2854 - protein, 9 aa, synthetic construct
CKRKKRFCP

SEQ ID NO: 2855 - protein, 9 aa, synthetic construct
HPKRKRQYP

SEQ ID NO: 2856 - protein, 9 aa, synthetic construct
HEKRAKHCP

SEQ ID NO: 2857 - protein, 9 aa, synthetic construct
HKRRKRQQP

SEQ ID NO: 2858 - protein, 9 aa, synthetic construct
HKKRKRLND

SEQ ID NO: 2859 - protein, 9 aa, synthetic construct
HKKRGRQQH

SEQ ID NO: 2860 - protein, 9 aa, synthetic construct
HKKKSRHRP

SEQ ID NO: 2861 - protein, 9 aa, synthetic construct
HKKRKRMYP

SEQ ID NO: 2862 - protein, 9 aa, synthetic construct
HKKRARSRW

SEQ ID NO: 2863 - protein, 9 aa, synthetic construct
HDKKAKFRP

SEQ ID NO: 2864 - protein, 9 aa, synthetic construct
HKRRAKQRP

SEQ ID NO: 2865 - protein, 9 aa, synthetic construct
HKRLLKDRP

SEQ ID NO: 2866 - protein, 9 aa, synthetic construct
HKKRARQRL

SEQ ID NO: 2867 - protein, 9 aa, synthetic construct
HKKKKRMKP

SEQ ID NO: 2868 - protein, 9 aa, synthetic construct
HKRKKRVRW

SEQ ID NO: 2869 - protein, 9 aa, synthetic construct
HKKKLRMRP

SEQ ID NO: 2870 - protein, 9 aa, synthetic construct
IKKRARMRP

SEQ ID NO: 2871 - protein, 9 aa, synthetic construct
HKKRKKLCP

SEQ ID NO: 2872 - protein, 9 aa, synthetic construct
HKKRKRFCP

SEQ ID NO: 2873 - protein, 9 aa, synthetic construct
HKKRKKTLA

SEQ ID NO: 2874 - protein, 9 aa, synthetic construct
TKKRKRVCP

SEQ ID NO: 2875 - protein, 9 aa, synthetic construct
HPRKKKLRP

SEQ ID NO: 2876 - protein, 9 aa, synthetic construct
HKKRAKFQP

SEQ ID NO: 2877 - protein, 9 aa, synthetic construct
ACRKGKQAW

SEQ ID NO: 2878 - protein, 9 aa, synthetic construct
HPRRKRTKP

SEQ ID NO: 2879 - protein, 9 aa, synthetic construct
HQRRARLRP

SEQ ID NO: 2880 - protein, 9 aa, synthetic construct
IKKRKRTRP

SEQ ID NO: 2881 - protein, 9 aa, synthetic construct
HRKKKKDKS

SEQ ID NO: 2882 - protein, 9 aa, synthetic construct
HKKRKRQRW

SEQ ID NO: 2883 - protein, 9 aa, synthetic construct
HKKRKRRRM

SEQ ID NO: 2884 - protein, 9 aa, synthetic construct
HPKRKKQRP

SEQ ID NO: 2885 - protein, 9 aa, synthetic construct
HQKRGRCRP

SEQ ID NO: 2886 - protein, 9 aa, synthetic construct
HPKRARFRP

SEQ ID NO: 2887 - protein, 9 aa, synthetic construct
HKKKKRQRY

SEQ ID NO: 2888 - protein, 9 aa, synthetic construct
AKRRAKARP

SEQ ID NO: 2889 - protein, 9 aa, synthetic construct
HKRKKRQKN

SEQ ID NO: 2890 - protein, 9 aa, synthetic construct
HKKRAKSQT

SEQ ID NO: 2891 - protein, 9 aa, synthetic construct
SDKRKRMKT

SEQ ID NO: 2892 - protein, 9 aa, synthetic construct
HKRKKRKRP

SEQ ID NO: 2893 - protein, 9 aa, synthetic construct
HKKRKRMRW

SEQ ID NO: 2894 - protein, 9 aa, synthetic construct
HDKRARTRP

SEQ ID NO: 2895 - protein, 9 aa, synthetic construct
MDKKKRQKP

SEQ ID NO: 2896 - protein, 9 aa, synthetic construct
HKKKKRTAD

SEQ ID NO: 2897 - protein, 9 aa, synthetic construct
HKRKKRLKP

SEQ ID NO: 2898 - protein, 9 aa, synthetic construct
HKKRKRLKP

SEQ ID NO: 2899 - protein, 9 aa, synthetic construct
HKKRARTRP

SEQ ID NO: 2900 - protein, 9 aa, synthetic construct
TKKRARVKP

SEQ ID NO: 2901 - protein, 9 aa, synthetic construct
HDKRKKLNT

SEQ ID NO: 2902 - protein, 9 aa, synthetic construct
HKKKGRHRP

SEQ ID NO: 2903 - protein, 9 aa, synthetic construct
TKKRARFRP

SEQ ID NO: 2904 - protein, 9 aa, synthetic construct
HKKRKRFNP

SEQ ID NO: 2905 - protein, 9 aa, synthetic construct
HDKRKRTRP

SEQ ID NO: 2906 - protein, 9 aa, synthetic construct
TDKRKRFRP

SEQ ID NO: 2907 - protein, 9 aa, synthetic construct
HKKRKKFQP

SEQ ID NO: 2908 - protein, 9 aa, synthetic construct
HKKRKRVQC

SEQ ID NO: 2909 - protein, 9 aa, synthetic construct
HKKKKRQRP

SEQ ID NO: 2910 - protein, 9 aa, synthetic construct
TRKKKKMKN

SEQ ID NO: 2911 - protein, 9 aa, synthetic construct
TKKRKRMRS

SEQ ID NO: 2912 - protein, 9 aa, synthetic construct
HKRRKRTKP

SEQ ID NO: 2913 - protein, 9 aa, synthetic construct
TRKRARVKP

SEQ ID NO: 2914 - protein, 9 aa, synthetic construct
TKKKKRMGY

SEQ ID NO: 2915 - protein, 9 aa, synthetic construct
HKKRGKVRP

SEQ ID NO: 2916 - protein, 9 aa, synthetic construct
KKKRKRQCV

SEQ ID NO: 2917 - protein, 9 aa, synthetic construct
HRKRKRTRP

SEQ ID NO: 2918 - protein, 9 aa, synthetic construct
HDRRAKRAY

SEQ ID NO: 2919 - protein, 9 aa, synthetic construct
HKKKKRERY

SEQ ID NO: 2920 - protein, 9 aa, synthetic construct
HKKKKRHRW

SEQ ID NO: 2921 - protein, 9 aa, synthetic construct
HKRKKKVRY

SEQ ID NO: 2922 - protein, 9 aa, synthetic construct
HKKKLKTQS

SEQ ID NO: 2923 - protein, 9 aa, synthetic construct
HPKRKRMCP

SEQ ID NO: 2924 - protein, 9 aa, synthetic construct
HRKRKRMRP

SEQ ID NO: 2925 - protein, 9 aa, synthetic construct
HRKRARVKP

SEQ ID NO: 2926 - protein, 9 aa, synthetic construct
HDKRKRMRP

SEQ ID NO: 2927 - protein, 9 aa, synthetic construct
HRKKKKVRP

SEQ ID NO: 2928 - protein, 9 aa, synthetic construct
HCRRAKFLP

SEQ ID NO: 2929 - protein, 9 aa, synthetic construct
HDRRKRLRP

SEQ ID NO: 2930 - protein, 9 aa, synthetic construct
HKKRKRFKS

SEQ ID NO: 2931 - protein, 9 aa, synthetic construct
HCRKKRFRP

SEQ ID NO: 2932 - protein, 9 aa, synthetic construct
HKKRARQRS

SEQ ID NO: 2933 - protein, 9 aa, synthetic construct
HKRKKRQKP

SEQ ID NO: 2934 - protein, 9 aa, synthetic construct
HRRRKRFHW

SEQ ID NO: 2935 - protein, 9 aa, synthetic construct
HKKKKRVRP

SEQ ID NO: 2936 - protein, 9 aa, synthetic construct
HKRRKKTRT

SEQ ID NO: 2937 - protein, 9 aa, synthetic construct
HPKRKRTRP

SEQ ID NO: 2938 - protein, 9 aa, synthetic construct
HKKKARSRP

SEQ ID NO: 2939 - protein, 9 aa, synthetic construct
HKKKKKTNN

SEQ ID NO: 2940 - protein, 9 aa, synthetic construct
HKRRARARP

SEQ ID NO: 2941 - protein, 9 aa, synthetic construct
HCRKAKQQP

SEQ ID NO: 2942 - protein, 9 aa, synthetic construct
HPKRAKQIP

SEQ ID NO: 2943 - protein, 9 aa, synthetic construct
HKKRKRLQP

SEQ ID NO: 2944 - protein, 9 aa, synthetic construct
HKKKKKGKP

SEQ ID NO: 2945 - protein, 9 aa, synthetic construct
HKKRKKMCP

SEQ ID NO: 2946 - protein, 9 aa, synthetic construct
HDKKGRVKP

SEQ ID NO: 2947 - protein, 9 aa, synthetic construct
HKKRKRVRC

SEQ ID NO: 2948 - protein, 9 aa, synthetic construct
HKKRKRMDS

SEQ ID NO: 2949 - protein, 9 aa, synthetic construct
HKRKKRFRS

SEQ ID NO: 2950 - protein, 9 aa, synthetic construct
HRKKKRHKW

SEQ ID NO: 2951 - protein, 9 aa, synthetic construct
HQKKKRFRP

SEQ ID NO: 2952 - protein, 9 aa, synthetic construct
HKRRDRTKP

SEQ ID NO: 2953 - protein, 9 aa, synthetic construct
HDKKKRMNP

SEQ ID NO: 2954 - protein, 9 aa, synthetic construct
HKKRSRDRE

SEQ ID NO: 2955 - protein, 9 aa, synthetic construct
HDKKKKQRC

SEQ ID NO: 2956 - protein, 9 aa, synthetic construct
TKKKKRFCS

SEQ ID NO: 2957 - protein, 9 aa, synthetic construct
HEKRGKHRP

SEQ ID NO: 2958 - protein, 9 aa, synthetic construct
HKKRKRFRW

SEQ ID NO: 2959 - protein, 9 aa, synthetic construct
PKKRKRMRW

SEQ ID NO: 2960 - protein, 9 aa, synthetic construct
AKKRSKQQY

SEQ ID NO: 2961 - protein, 9 aa, synthetic construct
AKKKKRMKW

SEQ ID NO: 2962 - protein, 9 aa, synthetic construct
AKKKARVIP

SEQ ID NO: 2963 - protein, 9 aa, synthetic construct
HKKKARQRP

SEQ ID NO: 2964 - protein, 9 aa, synthetic construct
HKKRKKVNP

SEQ ID NO: 2965 - protein, 9 aa, synthetic construct
TPKKKRLQN

SEQ ID NO: 2966 - protein, 9 aa, synthetic construct
HKKRKRLAN

SEQ ID NO: 2967 - protein, 9 aa, synthetic construct
YKKRKRQRL

SEQ ID NO: 2968 - protein, 9 aa, synthetic construct
HRRKTRMRS

SEQ ID NO: 2969 - protein, 9 aa, synthetic construct
HKKRKRQAW

SEQ ID NO: 2970 - protein, 9 aa, synthetic construct
KKKKKRHRP

SEQ ID NO: 2971 - protein, 9 aa, synthetic construct
HKKRGKEKP

SEQ ID NO: 2972 - protein, 9 aa, synthetic construct
AKKRKRQRP

SEQ ID NO: 2973 - protein, 9 aa, synthetic construct
HKKSAKDRP

SEQ ID NO: 2974 - protein, 9 aa, synthetic construct
HKKRQRQAP

SEQ ID NO: 2975 - protein, 9 aa, synthetic construct
HDKKKKFQW

SEQ ID NO: 2976 - protein, 9 aa, synthetic construct
HKKKKKQRW

SEQ ID NO: 2977 - protein, 9 aa, synthetic construct
AKKRKRQKP

SEQ ID NO: 2978 - protein, 9 aa, synthetic construct
HKRRARVKP

SEQ ID NO: 2979 - protein, 9 aa, synthetic construct
HSRRARMRT

SEQ ID NO: 2980 - protein, 9 aa, synthetic construct
HKTRARFKP

SEQ ID NO: 2981 - protein, 9 aa, synthetic construct
AKKRKRLCQ

SEQ ID NO: 2982 - protein, 9 aa, synthetic construct
ACKRKRMKP

SEQ ID NO: 2983 - protein, 9 aa, synthetic construct
HCKRARVKP

SEQ ID NO: 2984 - protein, 9 aa, synthetic construct
HRRRKRGRS

SEQ ID NO: 2985 - protein, 9 aa, synthetic construct
HKKRARVQP

SEQ ID NO: 2986 - protein, 9 aa, synthetic construct
HSKRARQGW

SEQ ID NO: 2987 - protein, 9 aa, synthetic construct
HKKRAKHRC

SEQ ID NO: 2988 - protein, 9 aa, synthetic construct
HDKKKRHKP

SEQ ID NO: 2989 - protein, 9 aa, synthetic construct
HKKRARVKD

SEQ ID NO: 2990 - protein, 9 aa, synthetic construct
HKKRKKVRP

SEQ ID NO: 2991 - protein, 9 aa, synthetic construct
AKRKKRVKP

SEQ ID NO: 2992 - protein, 9 aa, synthetic construct
HKRRKKTAY

SEQ ID NO: 2993 - protein, 9 aa, synthetic construct
HKKKARHRP

SEQ ID NO: 2994 - protein, 9 aa, synthetic construct
ARKRARQQP

SEQ ID NO: 2995 - protein, 9 aa, synthetic construct
IKKRGRVRY

SEQ ID NO: 2996 - protein, 9 aa, synthetic construct
HEKKARVKP

SEQ ID NO: 2997 - protein, 9 aa, synthetic construct
HKRRKKRRT

SEQ ID NO: 2998 - protein, 9 aa, synthetic construct
HKRRKRQRP

SEQ ID NO: 2999 - protein, 9 aa, synthetic construct
TKKRDRHYP

SEQ ID NO: 3000 - protein, 9 aa, synthetic construct
HDKRAKQRP

SEQ ID NO: 3001 - protein, 9 aa, synthetic construct
HKKRKRLRW

SEQ ID NO: 3002 - protein, 9 aa, synthetic construct
HSKKKKFCP

SEQ ID NO: 3003 - protein, 9 aa, synthetic construct
HKKRKKQRW

SEQ ID NO: 3004 - protein, 9 aa, synthetic construct
HCKRAKARC

SEQ ID NO: 3005 - protein, 9 aa, synthetic construct
HKKKKKQQP

SEQ ID NO: 3006 - protein, 9 aa, synthetic construct
AKRKKKQRP

SEQ ID NO: 3007 - protein, 9 aa, synthetic construct
HQKRKKDQP

SEQ ID NO: 3008 - protein, 9 aa, synthetic construct
HKKRKRSKY

SEQ ID NO: 3009 - protein, 9 aa, synthetic construct
HKRRKKTQP

SEQ ID NO: 3010 - protein, 9 aa, synthetic construct
HKRRKRTKW

SEQ ID NO: 3011 - protein, 9 aa, synthetic construct
HDKRARERP

SEQ ID NO: 3012 - protein, 9 aa, synthetic construct
HKKKKKHKT

SEQ ID NO: 3013 - protein, 9 aa, synthetic construct
AKKRKRFRP

SEQ ID NO: 3014 - protein, 9 aa, synthetic construct
KKKRARMRP

SEQ ID NO: 3015 - protein, 9 aa, synthetic construct
HKKRARHEP

SEQ ID NO: 3016 - protein, 9 aa, synthetic construct
HKKRAKERP

SEQ ID NO: 3017 - protein, 9 aa, synthetic construct
HKKRCKSNP

SEQ ID NO: 3018 - protein, 9 aa, synthetic construct
HKKRARFMP

SEQ ID NO: 3019 - protein, 9 aa, synthetic construct
HKRSKRQRW

SEQ ID NO: 3020 - protein, 9 aa, synthetic construct
HLKKKKAKP

SEQ ID NO: 3021 - protein, 9 aa, synthetic construct
HKKRKKHRP

SEQ ID NO: 3022 - protein, 9 aa, synthetic construct
HRKRKKQRP

SEQ ID NO: 3023 - protein, 9 aa, synthetic construct
HKKKKKQKN

SEQ ID NO: 3024 - protein, 9 aa, synthetic construct
HKRRDRKQP

SEQ ID NO: 3025 - protein, 9 aa, synthetic construct
HCKKKKQKW

SEQ ID NO: 3026 - protein, 9 aa, synthetic construct
HKKRKRVRS

SEQ ID NO: 3027 - protein, 9 aa, synthetic construct
HDKKKKTGN

SEQ ID NO: 3028 - protein, 9 aa, synthetic construct
EKKRKRHRT

SEQ ID NO: 3029 - protein, 9 aa, synthetic construct
TKKKKKVRP

SEQ ID NO: 3030 - protein, 9 aa, synthetic construct
HKRKKKVKP

SEQ ID NO: 3031 - protein, 9 aa, synthetic construct
HKKRKREQP

SEQ ID NO: 3032 - protein, 9 aa, synthetic construct
HKKRKKLKW

SEQ ID NO: 3033 - protein, 9 aa, synthetic construct
HKKRDRTKP

SEQ ID NO: 3034 - protein, 9 aa, synthetic construct
HKKRKKQNY

SEQ ID NO: 3035 - protein, 9 aa, synthetic construct
HKRRKRRRH

SEQ ID NO: 3036 - protein, 9 aa, synthetic construct
ADKKAKVAP

SEQ ID NO: 3037 - protein, 9 aa, synthetic construct
HCRKKKQRP

SEQ ID NO: 3038 - protein, 9 aa, synthetic construct
HKKKAKLQP

SEQ ID NO: 3039 - protein, 9 aa, synthetic construct
HKKKGRFRY

SEQ ID NO: 3040 - protein, 9 aa, synthetic construct
HDKRKRFKP

SEQ ID NO: 3041 - protein, 9 aa, synthetic construct
HKRRLRQRP

SEQ ID NO: 3042 - protein, 9 aa, synthetic construct
HPKRKRERP

SEQ ID NO: 3043 - protein, 9 aa, synthetic construct
HKKKLKTCP

SEQ ID NO: 3044 - protein, 9 aa, synthetic construct
HKKKGKQAP

SEQ ID NO: 3045 - protein, 9 aa, synthetic construct
HKKRKKMRN

SEQ ID NO: 3046 - protein, 9 aa, synthetic construct
HKKRKKSRN

SEQ ID NO: 3047 - protein, 9 aa, synthetic construct
TKKRKKVRP

SEQ ID NO: 3048 - protein, 9 aa, synthetic construct
HDKKARTKP

SEQ ID NO: 3049 - protein, 9 aa, synthetic construct
HCKRAKQRP

SEQ ID NO: 3050 - protein, 9 aa, synthetic construct
HRKRARTRP

SEQ ID NO: 3051 - protein, 9 aa, synthetic construct
ACKRGRLRP

SEQ ID NO: 3052 - protein, 9 aa, synthetic construct
HKKRKRHRP

SEQ ID NO: 3053 - protein, 9 aa, synthetic construct
AKKKKRVRP

SEQ ID NO: 3054 - protein, 9 aa, synthetic construct
TKKRKRVRP

SEQ ID NO: 3055 - protein, 9 aa, synthetic construct
HKRKARHKN

SEQ ID NO: 3056 - protein, 9 aa, synthetic construct
HKKKGRLRP

SEQ ID NO: 3057 - protein, 9 aa, synthetic construct
HQKKGKVKP

SEQ ID NO: 3058 - protein, 9 aa, synthetic construct
HKKKKKQRT

SEQ ID NO: 3059 - protein, 9 aa, synthetic construct
AKKRKRRRY

SEQ ID NO: 3060 - protein, 9 aa, synthetic construct
HKKRGRHKY

SEQ ID NO: 3061 - protein, 9 aa, synthetic construct
HKKRKKVCP

SEQ ID NO: 3062 - protein, 9 aa, synthetic construct
HRKKKRQRP

SEQ ID NO: 3063 - protein, 9 aa, synthetic construct
HDKKSKQRP

SEQ ID NO: 3064 - protein, 9 aa, synthetic construct
HKRRKRQWP

SEQ ID NO: 3065 - protein, 9 aa, synthetic construct
AKKRKRLRP

SEQ ID NO: 3066 - protein, 9 aa, synthetic construct
HKRRKRQPP

SEQ ID NO: 3067 - protein, 9 aa, synthetic construct
HDKKKKMKV

SEQ ID NO: 3068 - protein, 9 aa, synthetic construct
HCRRAKTRW

SEQ ID NO: 3069 - protein, 9 aa, synthetic construct
HCKKKKMRP

SEQ ID NO: 3070 - protein, 9 aa, synthetic construct
TCRKGKQRP

SEQ ID NO: 3071 - protein, 9 aa, synthetic construct
HKKRARFKS

SEQ ID NO: 3072 - protein, 9 aa, synthetic construct
SPKRKRFRS

SEQ ID NO: 3073 - protein, 9 aa, synthetic construct
ADKKKRHKP

SEQ ID NO: 3074 - protein, 9 aa, synthetic construct
HDKRARSRP

SEQ ID NO: 3075 - protein, 9 aa, synthetic construct
HKKKKKQQM

SEQ ID NO: 3076 - protein, 9 aa, synthetic construct
HKKRGRVQP

SEQ ID NO: 3077 - protein, 9 aa, synthetic construct
HKRKKKDCQ

SEQ ID NO: 3078 - protein, 9 aa, synthetic construct
HKKKKKFKP

SEQ ID NO: 3079 - protein, 9 aa, synthetic construct
HKKKARLQP

SEQ ID NO: 3080 - protein, 9 aa, synthetic construct
ARKRARVRP

SEQ ID NO: 3081 - protein, 9 aa, synthetic construct
HQKRGRVYP

SEQ ID NO: 3082 - protein, 9 aa, synthetic construct
HKKRKRVRY

SEQ ID NO: 3083 - protein, 9 aa, synthetic construct
HKKKKKLRP

SEQ ID NO: 3084 - protein, 9 aa, synthetic construct
TKKKKRVRP

SEQ ID NO: 3085 - protein, 9 aa, synthetic construct
HLKRARQRP

SEQ ID NO: 3086 - protein, 9 aa, synthetic construct
TKKKKKQRP

SEQ ID NO: 3087 - protein, 9 aa, synthetic construct
QKKRKKQEW

SEQ ID NO: 3088 - protein, 9 aa, synthetic construct
HKKRKRRRH

SEQ ID NO: 3089 - protein, 9 aa, synthetic construct
HKRKKRVRP

SEQ ID NO: 3090 - protein, 9 aa, synthetic construct
HCKRKRMQS

SEQ ID NO: 3091 - protein, 9 aa, synthetic construct
HKKRKRTRY

SEQ ID NO: 3092 - protein, 9 aa, synthetic construct
HKKRKHQKP

SEQ ID NO: 3093 - protein, 9 aa, synthetic construct
HEKKAKTQT

SEQ ID NO: 3094 - protein, 9 aa, synthetic construct
HDKKKKTRP

SEQ ID NO: 3095 - protein, 9 aa, synthetic construct
TKRKGRDKS

SEQ ID NO: 3096 - protein, 9 aa, synthetic construct
HKKRARVKP

SEQ ID NO: 3097 - protein, 9 aa, synthetic construct
HCKRKRVRE

SEQ ID NO: 3098 - protein, 9 aa, synthetic construct
HKKRKRFVL

SEQ ID NO: 3099 - protein, 9 aa, synthetic construct
TRKRAKVQP

SEQ ID NO: 3100 - protein, 9 aa, synthetic construct
TKKKKRRIP

SEQ ID NO: 3101 - protein, 9 aa, synthetic construct
HRKRKRRRP

SEQ ID NO: 3102 - protein, 9 aa, synthetic construct
HEKKKRQKP

SEQ ID NO: 3103 - protein, 9 aa, synthetic construct
HKKKGRMRY

SEQ ID NO: 3104 - protein, 9 aa, synthetic construct
HCRKGRQKY

SEQ ID NO: 3105 - protein, 9 aa, synthetic construct
HDKRKRTKE

SEQ ID NO: 3106 - protein, 9 aa, synthetic construct
HQRSAKQCC

SEQ ID NO: 3107 - protein, 9 aa, synthetic construct
HRKRKRFRP

SEQ ID NO: 3108 - protein, 9 aa, synthetic construct
HKKKLRVQW

SEQ ID NO: 3109 - protein, 9 aa, synthetic construct
HKRRARFRP

SEQ ID NO: 3110 - protein, 9 aa, synthetic construct
HDRRKKQRP

SEQ ID NO: 3111 - protein, 9 aa, synthetic construct
HKRRKRVAP

SEQ ID NO: 3112 - protein, 9 aa, synthetic construct
KKKRKRQKP

SEQ ID NO: 3113 - protein, 9 aa, synthetic construct
HKKKARVKP

SEQ ID NO: 3114 - protein, 9 aa, synthetic construct
HKRRARMRT

SEQ ID NO: 3115 - protein, 9 aa, synthetic construct
HKKKAKVKP

SEQ ID NO: 3116 - protein, 9 aa, synthetic construct
MQKKKRHRP

SEQ ID NO: 3117 - protein, 9 aa, synthetic construct
HKKKKKVKT

SEQ ID NO: 3118 - protein, 9 aa, synthetic construct
TDRRLKTIP

SEQ ID NO: 3119 - protein, 9 aa, synthetic construct
HKRKKRTKW

SEQ ID NO: 3120 - protein, 9 aa, synthetic construct
HKRKLKQRP

SEQ ID NO: 3121 - protein, 9 aa, synthetic construct
TKKKKRQRP

SEQ ID NO: 3122 - protein, 9 aa, synthetic construct
APKRGRFIP

SEQ ID NO: 3123 - protein, 9 aa, synthetic construct
HRKKLRFKP

SEQ ID NO: 3124 - protein, 9 aa, synthetic construct
HKKRARVKT

SEQ ID NO: 3125 - protein, 9 aa, synthetic construct
KKRKKRQRP

SEQ ID NO: 3126 - protein, 9 aa, synthetic construct
HKKKKRQQP

SEQ ID NO: 3127 - protein, 9 aa, synthetic construct
HKRRKRSYS

SEQ ID NO: 3128 - protein, 9 aa, synthetic construct
HCRRAKVKC

SEQ ID NO: 3129 - protein, 9 aa, synthetic construct
QKKRGRRKW

SEQ ID NO: 3130 - protein, 9 aa, synthetic construct
HRRKGRQRT

SEQ ID NO: 3131 - protein, 9 aa, synthetic construct
HKRRKRFRN

SEQ ID NO: 3132 - protein, 9 aa, synthetic construct
HQRRAKLQY

SEQ ID NO: 3133 - protein, 9 aa, synthetic construct
HLKRARVRP

SEQ ID NO: 3134 - protein, 9 aa, synthetic construct
HKKKKRLKP

SEQ ID NO: 3135 - protein, 9 aa, synthetic construct
HKKKKRTCP

SEQ ID NO: 3136 - protein, 9 aa, synthetic construct
HDRKKKTRP

SEQ ID NO: 3137 - protein, 9 aa, synthetic construct
HKKKKKFRA

SEQ ID NO: 3138 - protein, 9 aa, synthetic construct
HDKRARFQP

SEQ ID NO: 3139 - protein, 9 aa, synthetic construct
HRKRGRTKS

SEQ ID NO: 3140 - protein, 9 aa, synthetic construct
HRKRKRHRP

SEQ ID NO: 3141 - protein, 9 aa, synthetic construct
HEKKGREAP

SEQ ID NO: 3142 - protein, 9 aa, synthetic construct
HKRKGRVCP

SEQ ID NO: 3143 - protein, 9 aa, synthetic construct
HKKKGKKRP

SEQ ID NO: 3144 - protein, 9 aa, synthetic construct
HKKRKKCRN

SEQ ID NO: 3145 - protein, 9 aa, synthetic construct
HKKRARVRT

SEQ ID NO: 3146 - protein, 9 aa, synthetic construct
KQKRKRFRS

SEQ ID NO: 3147 - protein, 9 aa, synthetic construct
HKRKKKDRP

SEQ ID NO: 3148 - protein, 9 aa, synthetic construct
HRKRSRVRP

SEQ ID NO: 3149 - protein, 9 aa, synthetic construct
HDKRARVRP

SEQ ID NO: 3150 - protein, 9 aa, synthetic construct
HKKRLRFRN

SEQ ID NO: 3151 - protein, 9 aa, synthetic construct
HKKRKRRNW

SEQ ID NO: 3152 - protein, 9 aa, synthetic construct
HQKRKRTRP

SEQ ID NO: 3153 - protein, 9 aa, synthetic construct
HKKRGKMKW

SEQ ID NO: 3154 - protein, 9 aa, synthetic construct
HKKKGKYRN

SEQ ID NO: 3155 - protein, 9 aa, synthetic construct
HKKKKRMRS

SEQ ID NO: 3156 - protein, 9 aa, synthetic construct
HKKKKRQCE

SEQ ID NO: 3157 - protein, 9 aa, synthetic construct
HKKKKRFEP

SEQ ID NO: 3158 - protein, 9 aa, synthetic construct
HLKRKKSKP

SEQ ID NO: 3159 - protein, 9 aa, synthetic construct
HCKKCRHRP

SEQ ID NO: 3160 - protein, 9 aa, synthetic construct
HKKKKRQRE

SEQ ID NO: 3161 - protein, 9 aa, synthetic construct
HDKRKRLRP

SEQ ID NO: 3162 - protein, 9 aa, synthetic construct
HPKSARQRP

SEQ ID NO: 3163 - protein, 9 aa, synthetic construct
HCKRKKLRP

SEQ ID NO: 3164 - protein, 9 aa, synthetic construct
HDRKKRQRP

SEQ ID NO: 3165 - protein, 9 aa, synthetic construct
HKRRKREKP

SEQ ID NO: 3166 - protein, 9 aa, synthetic construct
HKKRKKRSW

SEQ ID NO: 3167 - protein, 9 aa, synthetic construct
AKKRKRVQT

SEQ ID NO: 3168 - protein, 9 aa, synthetic construct
HKRRAKQGW

SEQ ID NO: 3169 - protein, 9 aa, synthetic construct
ADKRKKMRP

SEQ ID NO: 3170 - protein, 9 aa, synthetic construct
HLKRKRFRP

SEQ ID NO: 3171 - protein, 9 aa, synthetic construct
TKKRGRTNP

SEQ ID NO: 3172 - protein, 9 aa, synthetic construct
HKRKKRTRP

SEQ ID NO: 3173 - protein, 9 aa, synthetic construct
HKKRKRALP

SEQ ID NO: 3174 - protein, 9 aa, synthetic construct
HKRKKRMRN

SEQ ID NO: 3175 - protein, 9 aa, synthetic construct
KKKKKKQRW

SEQ ID NO: 3176 - protein, 9 aa, synthetic construct
HKKRKRVQP

SEQ ID NO: 3177 - protein, 9 aa, synthetic construct
HKKRKRVCP

SEQ ID NO: 3178 - protein, 9 aa, synthetic construct
AKRKKKDIP

SEQ ID NO: 3179 - protein, 9 aa, synthetic construct
HKRKGKMRP

SEQ ID NO: 3180 - protein, 9 aa, synthetic construct
HKRRKKDQW

SEQ ID NO: 3181 - protein, 9 aa, synthetic construct
HDKRAKTKP

SEQ ID NO: 3182 - protein, 9 aa, synthetic construct
HKKKKRVRW

SEQ ID NO: 3183 - protein, 9 aa, synthetic construct
HKKRKRTKA

SEQ ID NO: 3184 - protein, 9 aa, synthetic construct
HDRRKRQRW

SEQ ID NO: 3185 - protein, 9 aa, synthetic construct
HKRKAKERP

SEQ ID NO: 3186 - protein, 9 aa, synthetic construct
HKKKKRHRP

SEQ ID NO: 3187 - protein, 9 aa, synthetic construct
HKKKSRVRP

SEQ ID NO: 3188 - protein, 9 aa, synthetic construct
HKRRKKQKP

SEQ ID NO: 3189 - protein, 9 aa, synthetic construct
HCRRKRLRP

SEQ ID NO: 3190 - protein, 9 aa, synthetic construct
HQRRGRLRT

SEQ ID NO: 3191 - protein, 9 aa, synthetic construct
HKKRKRVRN

SEQ ID NO: 3192 - protein, 9 aa, synthetic construct
AEKKARTQW

SEQ ID NO: 3193 - protein, 9 aa, synthetic construct
TKKRKRAKE

SEQ ID NO: 3194 - protein, 9 aa, synthetic construct
AKKRARQRP

SEQ ID NO: 3195 - protein, 9 aa, synthetic construct
HRKKKRTAP

SEQ ID NO: 3196 - protein, 9 aa, synthetic construct
HKKRKRLRP

SEQ ID NO: 3197 - protein, 9 aa, synthetic construct
PKRKKRQRN

SEQ ID NO: 3198 - protein, 9 aa, synthetic construct
HKRKKKTRW

SEQ ID NO: 3199 - protein, 9 aa, synthetic construct
HRKRKRQRW

SEQ ID NO: 3200 - protein, 9 aa, synthetic construct
TKKRKRRGT

SEQ ID NO: 3201 - protein, 9 aa, synthetic construct
HKRRKKQGP

SEQ ID NO: 3202 - protein, 9 aa, synthetic construct
HKKKKKHRW

SEQ ID NO: 3203 - protein, 9 aa, synthetic construct
HDKKKRERP

SEQ ID NO: 3204 - protein, 9 aa, synthetic construct
HEKRLKFKW

SEQ ID NO: 3205 - protein, 9 aa, synthetic construct
IKKRKRMCY

SEQ ID NO: 3206 - protein, 9 aa, synthetic construct
HKKKKHQRP

SEQ ID NO: 3207 - protein, 9 aa, synthetic construct
HKKRKRHKC

SEQ ID NO: 3208 - protein, 9 aa, synthetic construct
HRKKKRQKP

SEQ ID NO: 3209 - protein, 9 aa, synthetic construct
HDKRKRSRP

SEQ ID NO: 3210 - protein, 9 aa, synthetic construct
HKKKGRQIP

SEQ ID NO: 3211 - protein, 9 aa, synthetic construct
HKRRKRTRP

SEQ ID NO: 3212 - protein, 9 aa, synthetic construct
HRKKKRARP

SEQ ID NO: 3213 - protein, 9 aa, synthetic construct
HKKRLKRRW

SEQ ID NO: 3214 - protein, 9 aa, synthetic construct
HCKRKKLAP

SEQ ID NO: 3215 - protein, 9 aa, synthetic construct
HKKRKKTRW

SEQ ID NO: 3216 - protein, 9 aa, synthetic construct
HKKRGHQRP

SEQ ID NO: 3217 - protein, 9 aa, synthetic construct
HKKRKRFQS

SEQ ID NO: 3218 - protein, 9 aa, synthetic construct
HKKKKRSKP

SEQ ID NO: 3219 - protein, 9 aa, synthetic construct
HKRKKKVKA

SEQ ID NO: 3220 - protein, 9 aa, synthetic construct
HKKKKKHRP

SEQ ID NO: 3221 - protein, 9 aa, synthetic construct
TLKRARVKP

SEQ ID NO: 3222 - protein, 9 aa, synthetic construct
HKKKKKFQP

SEQ ID NO: 3223 - protein, 9 aa, synthetic construct
HPRRKRKRP

SEQ ID NO: 3224 - protein, 9 aa, synthetic construct
AKKRARVRP

SEQ ID NO: 3225 - protein, 9 aa, synthetic construct
HKKKKRQRT

SEQ ID NO: 3226 - protein, 9 aa, synthetic construct
HKRKKRTRM

SEQ ID NO: 3227 - protein, 9 aa, synthetic construct
HRKRSRKRT

SEQ ID NO: 3228 - protein, 9 aa, synthetic construct
HCRRKKQKP

SEQ ID NO: 3229 - protein, 9 aa, synthetic construct
HKKRKRQGP

SEQ ID NO: 3230 - protein, 9 aa, synthetic construct
HKKKLKQRN

SEQ ID NO: 3231 - protein, 9 aa, synthetic construct
MKKKKRLKW

SEQ ID NO: 3232 - protein, 9 aa, synthetic construct
HRKKKKQKW

SEQ ID NO: 3233 - protein, 9 aa, synthetic construct
HKKRKRTKY

SEQ ID NO: 3234 - protein, 9 aa, synthetic construct
MKKRKKHRC

SEQ ID NO: 3235 - protein, 9 aa, synthetic construct
TKKRAKMRP

SEQ ID NO: 3236 - protein, 9 aa, synthetic construct
HRRKKKLRW

SEQ ID NO: 3237 - protein, 9 aa, synthetic construct
TKKRARSNP

SEQ ID NO: 3238 - protein, 9 aa, synthetic construct
HKKKTRHRP

SEQ ID NO: 3239 - protein, 9 aa, synthetic construct
HKRKKRFPP

SEQ ID NO: 3240 - protein, 9 aa, synthetic construct
HKKKKRAKW

SEQ ID NO: 3241 - protein, 9 aa, synthetic construct
HKRKKKARP

SEQ ID NO: 3242 - protein, 9 aa, synthetic construct
HKKRKRHVW

SEQ ID NO: 3243 - protein, 9 aa, synthetic construct
HDRKKKTRE

SEQ ID NO: 3244 - protein, 9 aa, synthetic construct
HKKRKRFPP

SEQ ID NO: 3245 - protein, 9 aa, synthetic construct
HLRKARIEP

SEQ ID NO: 3246 - protein, 9 aa, synthetic construct
HRRKARQRN

SEQ ID NO: 3247 - protein, 9 aa, synthetic construct
HCKKKKQRS

SEQ ID NO: 3248 - protein, 9 aa, synthetic construct
HKKRSRCKP

SEQ ID NO: 3249 - protein, 9 aa, synthetic construct
HGKKKKQQW

SEQ ID NO: 3250 - protein, 9 aa, synthetic construct
AKKKLRQRP

SEQ ID NO: 3251 - protein, 9 aa, synthetic construct
HKKRGRQRP

SEQ ID NO: 3252 - protein, 9 aa, synthetic construct
AKRKKRKRE

SEQ ID NO: 3253 - protein, 9 aa, synthetic construct
HKKRKKTRP

SEQ ID NO: 3254 - protein, 9 aa, synthetic construct
QKRRKRVRP

SEQ ID NO: 3255 - protein, 9 aa, synthetic construct
HKKRKRQRH

SEQ ID NO: 3256 - protein, 9 aa, synthetic construct
HKKRGKFCP

SEQ ID NO: 3257 - protein, 9 aa, synthetic construct
HKKRKRQRS

SEQ ID NO: 3258 - protein, 9 aa, synthetic construct
HKKKKRIRP

SEQ ID NO: 3259 - protein, 9 aa, synthetic construct
HKKRAKQRP

SEQ ID NO: 3260 - protein, 9 aa, synthetic construct
SKKRKRHRP

SEQ ID NO: 3261 - protein, 9 aa, synthetic construct
IKKRKRVEP

SEQ ID NO: 3262 - protein, 9 aa, synthetic construct
TKKRKKMRN

SEQ ID NO: 3263 - protein, 9 aa, synthetic construct
AKKKKKFGS

SEQ ID NO: 3264 - protein, 9 aa, synthetic construct
TQKKGRVKP

SEQ ID NO: 3265 - protein, 9 aa, synthetic construct
HDKRGRQRC

SEQ ID NO: 3266 - protein, 9 aa, synthetic construct
HKRRKRMRW

SEQ ID NO: 3267 - protein, 9 aa, synthetic construct
HKKRKRTQP

SEQ ID NO: 3268 - protein, 9 aa, synthetic construct
HKKKKKVKP

SEQ ID NO: 3269 - protein, 9 aa, synthetic construct
HKKKKKMCW

SEQ ID NO: 3270 - protein, 9 aa, synthetic construct
HKRRKKQND

SEQ ID NO: 3271 - protein, 9 aa, synthetic construct
HKKRKRVGP

SEQ ID NO: 3272 - protein, 9 aa, synthetic construct
YKKRGRMRP

SEQ ID NO: 3273 - protein, 9 aa, synthetic construct
KPKKKRFRG

SEQ ID NO: 3274 - protein, 9 aa, synthetic construct
AKKRKKQKS

SEQ ID NO: 3275 - protein, 9 aa, synthetic construct
HKRRKKWRP

SEQ ID NO: 3276 - protein, 9 aa, synthetic construct
HRKRKRLGY

SEQ ID NO: 3277 - protein, 9 aa, synthetic construct
HKRKDKVRT

SEQ ID NO: 3278 - protein, 9 aa, synthetic construct
HKRKKKHRW

SEQ ID NO: 3279 - protein, 9 aa, synthetic construct
HKRRKRRRP

SEQ ID NO: 3280 - protein, 9 aa, synthetic construct
HKKKGRART

SEQ ID NO: 3281 - protein, 9 aa, synthetic construct
AKKRARWIP

SEQ ID NO: 3282 - protein, 9 aa, synthetic construct
MKRRKKLRP

SEQ ID NO: 3283 - protein, 9 aa, synthetic construct
HKRKKKFKW

SEQ ID NO: 3284 - protein, 9 aa, synthetic construct
TRKRKRVCP

SEQ ID NO: 3285 - protein, 9 aa, synthetic construct
HQKKAKTEP

SEQ ID NO: 3286 - protein, 9 aa, synthetic construct
HKRKLKVRP

SEQ ID NO: 3287 - protein, 9 aa, synthetic construct
IKRRKRMHW

SEQ ID NO: 3288 - protein, 9 aa, synthetic construct
HKKKKKQKV

SEQ ID NO: 3289 - protein, 9 aa, synthetic construct
QCKRGRMRP

SEQ ID NO: 3290 - protein, 9 aa, synthetic construct
HQRKKKHKC

SEQ ID NO: 3291 - protein, 9 aa, synthetic construct
HKKKAKTRT

SEQ ID NO: 3292 - protein, 9 aa, synthetic construct
HKKRKRVRE

SEQ ID NO: 3293 - protein, 9 aa, synthetic construct
TPKRLRMAP

SEQ ID NO: 3294 - protein, 9 aa, synthetic construct
HCKKARVKP

SEQ ID NO: 3295 - protein, 9 aa, synthetic construct
TKRRKRFRP

SEQ ID NO: 3296 - protein, 9 aa, synthetic construct
KDRKKKQRT

SEQ ID NO: 3297 - protein, 9 aa, synthetic construct
HKRKKRMRP

SEQ ID NO: 3298 - protein, 9 aa, synthetic construct
HKKKLRQKA

SEQ ID NO: 3299 - protein, 9 aa, synthetic construct
TDPRGRQKP

SEQ ID NO: 3300 - protein, 9 aa, synthetic construct
HDKKARQRP

SEQ ID NO: 3301 - protein, 9 aa, synthetic construct
HKRKKRAWW

SEQ ID NO: 3302 - protein, 9 aa, synthetic construct
HKKRKRMRC

SEQ ID NO: 3303 - protein, 9 aa, synthetic construct
HKKRLRLRT

SEQ ID NO: 3304 - protein, 9 aa, synthetic construct
TKKKNKMGP

SEQ ID NO: 3305 - protein, 9 aa, synthetic construct
HKRRKRFRY

SEQ ID NO: 3306 - protein, 9 aa, synthetic construct
HKKRKKTKW

SEQ ID NO: 3307 - protein, 9 aa, synthetic construct
HDKKARLVP

SEQ ID NO: 3308 - protein, 9 aa, synthetic construct
HKRRAKTAP

SEQ ID NO: 3309 - protein, 9 aa, synthetic construct
HQRRKKFNN

SEQ ID NO: 3310 - protein, 9 aa, synthetic construct
HKKKKRLCW

SEQ ID NO: 3311 - protein, 9 aa, synthetic construct
HKKRKRFRC

SEQ ID NO: 3312 - protein, 9 aa, synthetic construct
EKKKKRVKP

SEQ ID NO: 3313 - protein, 9 aa, synthetic construct
HKKRKKQKP

SEQ ID NO: 3314 - protein, 9 aa, synthetic construct
TKKKKKQKP

SEQ ID NO: 3315 - protein, 9 aa, synthetic construct
HKKRKKQQN

SEQ ID NO: 3316 - protein, 9 aa, synthetic construct
HKKRGKAKW

SEQ ID NO: 3317 - protein, 9 aa, synthetic construct
AKKKGRHRP

SEQ ID NO: 3318 - protein, 9 aa, synthetic construct
HKKRKRRRP

SEQ ID NO: 3319 - protein, 9 aa, synthetic construct
AKKRARTRW

SEQ ID NO: 3320 - protein, 9 aa, synthetic construct
AKKKKRQCN

SEQ ID NO: 3321 - protein, 9 aa, synthetic construct
HRKRKRTAY

SEQ ID NO: 3322 - protein, 9 aa, synthetic construct
HKRKKRFIP

SEQ ID NO: 3323 - protein, 9 aa, synthetic construct
TKKRKRTKP

SEQ ID NO: 3324 - protein, 9 aa, synthetic construct
KDKKAKTQP

SEQ ID NO: 3325 - protein, 9 aa, synthetic construct
HKKKKRHRC

SEQ ID NO: 3326 - protein, 9 aa, synthetic construct
HRKKKKTWT

SEQ ID NO: 3327 - protein, 9 aa, synthetic construct
AKRKGRLFP

SEQ ID NO: 3328 - protein, 9 aa, synthetic construct
HKKKKHTNP

SEQ ID NO: 3329 - protein, 9 aa, synthetic construct
HKKRLRVRW

SEQ ID NO: 3330 - protein, 9 aa, synthetic construct
HKKRKRQRL

SEQ ID NO: 3331 - protein, 9 aa, synthetic construct
HKRRARQRY

SEQ ID NO: 3332 - protein, 9 aa, synthetic construct
HCKKARSKP

SEQ ID NO: 3333 - protein, 9 aa, synthetic construct
HKKKKKRNH

SEQ ID NO: 3334 - protein, 9 aa, synthetic construct
HKKRSRLKP

SEQ ID NO: 3335 - protein, 9 aa, synthetic construct
HDKRAKQQP

SEQ ID NO: 3336 - protein, 9 aa, synthetic construct
HRKRGRLNP

SEQ ID NO: 3337 - protein, 9 aa, synthetic construct
HKKKAKARP

SEQ ID NO: 3338 - protein, 9 aa, synthetic construct
HKKRARMKP

SEQ ID NO: 3339 - protein, 9 aa, synthetic construct
HKKRGKVEY

SEQ ID NO: 3340 - protein, 9 aa, synthetic construct
HRKRQRARP

SEQ ID NO: 3341 - protein, 9 aa, synthetic construct
HPKKKKQKP

SEQ ID NO: 3342 - protein, 9 aa, synthetic construct
TVKRARVAT

SEQ ID NO: 3343 - protein, 9 aa, synthetic construct
HDRKLRQRP

SEQ ID NO: 3344 - protein, 9 aa, synthetic construct
HEKRKRMAP

SEQ ID NO: 3345 - protein, 9 aa, synthetic construct
HKKRSRMRP

SEQ ID NO: 3346 - protein, 9 aa, synthetic construct
HDKKKKLRP

SEQ ID NO: 3347 - protein, 9 aa, synthetic construct
HKRKGRGRP

SEQ ID NO: 3348 - protein, 9 aa, synthetic construct
HKKKAKVAS

SEQ ID NO: 3349 - protein, 9 aa, synthetic construct
TKKRGRQCP

SEQ ID NO: 3350 - protein, 9 aa, synthetic construct
HCKKKRQKS

SEQ ID NO: 3351 - protein, 9 aa, synthetic construct
AKKRAKQKS

SEQ ID NO: 3352 - protein, 9 aa, synthetic construct
HGKRKKVHT

SEQ ID NO: 3353 - protein, 9 aa, synthetic construct
HRKKKKVPP

SEQ ID NO: 3354 - protein, 9 aa, synthetic construct
SCKRGRTRP

SEQ ID NO: 3355 - protein, 9 aa, synthetic construct
HPKKKRVRP

SEQ ID NO: 3356 - protein, 9 aa, synthetic construct
HKKRKRFWH

SEQ ID NO: 3357 - protein, 9 aa, synthetic construct
HKKKKKFRP

SEQ ID NO: 3358 - protein, 9 aa, synthetic construct
HQKRKRVRA

SEQ ID NO: 3359 - protein, 9 aa, synthetic construct
HKKKARARP

SEQ ID NO: 3360 - protein, 9 aa, synthetic construct
HKKRKRFGP

SEQ ID NO: 3361 - protein, 9 aa, synthetic construct
HRKRKKMRP

SEQ ID NO: 3362 - protein, 9 aa, synthetic construct
ADRKKRMRN

SEQ ID NO: 3363 - protein, 9 aa, synthetic construct
AKRRKRHAP

SEQ ID NO: 3364 - protein, 9 aa, synthetic construct
HKKRKKTNC

SEQ ID NO: 3365 - protein, 9 aa, synthetic construct
HQKRDKQRT

SEQ ID NO: 3366 - protein, 9 aa, synthetic construct
HRKRKRQRC

SEQ ID NO: 3367 - protein, 9 aa, synthetic construct
HQKRKRVKP

SEQ ID NO: 3368 - protein, 9 aa, synthetic construct
AKKRKRVRP

SEQ ID NO: 3369 - protein, 9 aa, synthetic construct
HKRKKRHKC

SEQ ID NO: 3370 - protein, 9 aa, synthetic construct
AKKRSRVHP

SEQ ID NO: 3371 - protein, 9 aa, synthetic construct
HRKRKRHRW

SEQ ID NO: 3372 - protein, 9 aa, synthetic construct
HKKRKRFRT

SEQ ID NO: 3373 - protein, 9 aa, synthetic construct
TKKRKRVQP

SEQ ID NO: 3374 - protein, 9 aa, synthetic construct
AKKRKKVKP

SEQ ID NO: 3375 - protein, 9 aa, synthetic construct
HKKRGRHRS

SEQ ID NO: 3376 - protein, 9 aa, synthetic construct
HRKKKRLRW

SEQ ID NO: 3377 - protein, 9 aa, synthetic construct
SKRKKRFKD

SEQ ID NO: 3378 - protein, 9 aa, synthetic construct
HDKRGRTKP

SEQ ID NO: 3379 - protein, 9 aa, synthetic construct
HERKKRERP

SEQ ID NO: 3380 - protein, 9 aa, synthetic construct
AKKRKRVAP

SEQ ID NO: 3381 - protein, 9 aa, synthetic construct
HKKRLHVRE

SEQ ID NO: 3382 - protein, 9 aa, synthetic construct
HKKRGRLRP

SEQ ID NO: 3383 - protein, 9 aa, synthetic construct
HPKRKRVKP

SEQ ID NO: 3384 - protein, 9 aa, synthetic construct
HKKRSRQRP

SEQ ID NO: 3385 - protein, 9 aa, synthetic construct
HRKKKRTRP

SEQ ID NO: 3386 - protein, 9 aa, synthetic construct
AKKRLRHRS

SEQ ID NO: 3387 - protein, 9 aa, synthetic construct
HQKKKRTRW

SEQ ID NO: 3388 - protein, 9 aa, synthetic construct
HKKRKRGKY

SEQ ID NO: 3389 - protein, 9 aa, synthetic construct
HDKRARFRY

SEQ ID NO: 3390 - protein, 9 aa, synthetic construct
TKCRKRVRP

SEQ ID NO: 3391 - protein, 9 aa, synthetic construct
TRKKKRVCP

SEQ ID NO: 3392 - protein, 9 aa, synthetic construct
HKKRKRVWY

SEQ ID NO: 3393 - protein, 9 aa, synthetic construct
HQKKLRSKP

SEQ ID NO: 3394 - protein, 9 aa, synthetic construct
HKKRLRVRN

SEQ ID NO: 3395 - protein, 9 aa, synthetic construct
HLRKAKTKP

SEQ ID NO: 3396 - protein, 9 aa, synthetic construct
HKRKKRHKP

SEQ ID NO: 3397 - protein, 9 aa, synthetic construct
HKRKARQRE

SEQ ID NO: 3398 - protein, 9 aa, synthetic construct
HKKRARHKP

SEQ ID NO: 3399 - protein, 9 aa, synthetic construct
HKRKAKQAV

SEQ ID NO: 3400 - protein, 9 aa, synthetic construct
HDKRKRTQP

SEQ ID NO: 3401 - protein, 9 aa, synthetic construct
HQKKKRVKP

SEQ ID NO: 3402 - protein, 9 aa, synthetic construct
HPKRLRSRA

SEQ ID NO: 3403 - protein, 9 aa, synthetic construct
HCKRGRVRP

SEQ ID NO: 3404 - protein, 9 aa, synthetic construct
HLRKKRLKP

SEQ ID NO: 3405 - protein, 9 aa, synthetic construct
MKKRKRVRP

SEQ ID NO: 3406 - protein, 9 aa, synthetic construct
KKKKLKFQY

SEQ ID NO: 3407 - protein, 9 aa, synthetic construct
HKRKGKQRP

SEQ ID NO: 3408 - protein, 9 aa, synthetic construct
HDKKKKQRP

SEQ ID NO: 3409 - protein, 9 aa, synthetic construct
TKKRARQRP

SEQ ID NO: 3410 - protein, 9 aa, synthetic construct
HKRKKKLQL

SEQ ID NO: 3411 - protein, 9 aa, synthetic construct
MKKRKRRRP

SEQ ID NO: 3412 - protein, 9 aa, synthetic construct
HKKRGKDCW

SEQ ID NO: 3413 - protein, 9 aa, synthetic construct
PKRRGRTAP

SEQ ID NO: 3414 - protein, 9 aa, synthetic construct
HECRGRFRP

SEQ ID NO: 3415 - protein, 9 aa, synthetic construct
HRRRKRARP

SEQ ID NO: 3416 - protein, 9 aa, synthetic construct
AKKRKRHRP

SEQ ID NO: 3417 - protein, 9 aa, synthetic construct
HDKRGRHRN

SEQ ID NO: 3418 - protein, 9 aa, synthetic construct
AKRRARVKP

SEQ ID NO: 3419 - protein, 9 aa, synthetic construct
HCRKKKQRY

SEQ ID NO: 3420 - protein, 9 aa, synthetic construct
HKKKKRFRH

SEQ ID NO: 3421 - protein, 9 aa, synthetic construct
HKKRKRHRS

SEQ ID NO: 3422 - protein, 9 aa, synthetic construct
HKKRSRVRP

SEQ ID NO: 3423 - protein, 9 aa, synthetic construct
HKKRGRSRT

SEQ ID NO: 3424 - protein, 9 aa, synthetic construct
HKKKKRTKW

SEQ ID NO: 3425 - protein, 9 aa, synthetic construct
MKKKKRFRP

SEQ ID NO: 3426 - protein, 9 aa, synthetic construct
ADKKKKMRP

SEQ ID NO: 3427 - protein, 9 aa, synthetic construct
HRKRKRFKS

SEQ ID NO: 3428 - protein, 9 aa, synthetic construct
HKTRSRQKY

SEQ ID NO: 3429 - protein, 9 aa, synthetic construct
IKKKKRMRP

SEQ ID NO: 3430 - protein, 9 aa, synthetic construct
TKKRKRFKW

SEQ ID NO: 3431 - protein, 9 aa, synthetic construct
TKKKAKLKC

SEQ ID NO: 3432 - protein, 9 aa, synthetic construct
SDKRGRMCP

SEQ ID NO: 3433 - protein, 9 aa, synthetic construct
HKKRAKVKP

SEQ ID NO: 3434 - protein, 9 aa, synthetic construct
HKKKGRQRI

SEQ ID NO: 3435 - protein, 9 aa, synthetic construct
HLKKGKLRP

SEQ ID NO: 3436 - protein, 9 aa, synthetic construct
HKKRAKFKH

SEQ ID NO: 3437 - protein, 9 aa, synthetic construct
KKKKKRTRI

SEQ ID NO: 3438 - protein, 9 aa, synthetic construct
HKKRAKQKP

SEQ ID NO: 3439 - protein, 9 aa, synthetic construct
YKKKKKMKN

SEQ ID NO: 3440 - protein, 9 aa, synthetic construct
HKKKKRKRP

SEQ ID NO: 3441 - protein, 9 aa, synthetic construct
HKKRKKDKP

SEQ ID NO: 3442 - protein, 9 aa, synthetic construct
HDRRKRLKP

SEQ ID NO: 3443 - protein, 9 aa, synthetic construct
AKKRSRVRP

SEQ ID NO: 3444 - protein, 9 aa, synthetic construct
HKKKKRFKW

SEQ ID NO: 3445 - protein, 9 aa, synthetic construct
HKKRKRFRN

SEQ ID NO: 3446 - protein, 9 aa, synthetic construct
AKKKKRVCS

SEQ ID NO: 3447 - protein, 9 aa, synthetic construct
HKRRKRFIP

SEQ ID NO: 3448 - protein, 9 aa, synthetic construct
MEKRKRLRP

SEQ ID NO: 3449 - protein, 9 aa, synthetic construct
HKRKAKDRW

SEQ ID NO: 3450 - protein, 9 aa, synthetic construct
HRRRARMEP

SEQ ID NO: 3451 - protein, 9 aa, synthetic construct
HKKRLREKT

SEQ ID NO: 3452 - protein, 9 aa, synthetic construct
KPKKKRMKN

SEQ ID NO: 3453 - protein, 9 aa, synthetic construct
QKRRKRRRC

SEQ ID NO: 3454 - protein, 9 aa, synthetic construct
HRKKARVRW

SEQ ID NO: 3455 - protein, 9 aa, synthetic construct
HKRRARLRP

SEQ ID NO: 3456 - protein, 9 aa, synthetic construct
HKKRKRFWT

SEQ ID NO: 3457 - protein, 9 aa, synthetic construct
HKKKKRLAP

SEQ ID NO: 3458 - protein, 9 aa, synthetic construct
HRKKKKQRN

SEQ ID NO: 3459 - protein, 9 aa, synthetic construct
HKKRKKARP

SEQ ID NO: 3460 - protein, 9 aa, synthetic construct
HKKRLRTKP

SEQ ID NO: 3461 - protein, 9 aa, synthetic construct
HEKRKREQP

SEQ ID NO: 3462 - protein, 9 aa, synthetic construct
HCKRKRVRW

SEQ ID NO: 3463 - protein, 9 aa, synthetic construct
HKKKKKSRP

SEQ ID NO: 3464 - protein, 9 aa, synthetic construct
TKKKDRHKP

SEQ ID NO: 3465 - protein, 9 aa, synthetic construct
HKRKLRFRP

SEQ ID NO: 3466 - protein, 9 aa, synthetic construct
HEKRKKARD

SEQ ID NO: 3467 - protein, 9 aa, synthetic construct
AKKKKRFRP

SEQ ID NO: 3468 - protein, 9 aa, synthetic construct
HQRKARMKT

SEQ ID NO: 3469 - protein, 9 aa, synthetic construct
AKKRKRQKN

SEQ ID NO: 3470 - protein, 9 aa, synthetic construct
AKRKLRMRW

SEQ ID NO: 3471 - protein, 9 aa, synthetic construct
MKKRKKFKN

SEQ ID NO: 3472 - protein, 9 aa, synthetic construct
HKRKARLRS

SEQ ID NO: 3473 - protein, 9 aa, synthetic construct
HDKRKKQQP

SEQ ID NO: 3474 - protein, 9 aa, synthetic construct
HKKKKRRCM

SEQ ID NO: 3475 - protein, 9 aa, synthetic construct
HKKRGRGRW

SEQ ID NO: 3476 - protein, 9 aa, synthetic construct
HPKRKRTCP

SEQ ID NO: 3477 - protein, 9 aa, synthetic construct
ACKKKKQQP

SEQ ID NO: 3478 - protein, 9 aa, synthetic construct
PKKRGRTQP

SEQ ID NO: 3479 - protein, 9 aa, synthetic construct
HKKRKKERP

SEQ ID NO: 3480 - protein, 9 aa, synthetic construct
HKRRKRRRW

SEQ ID NO: 3481 - protein, 9 aa, synthetic construct
SKKRKRMRP

SEQ ID NO: 3482 - protein, 9 aa, synthetic construct
HLKKGRHRP

SEQ ID NO: 3483 - protein, 9 aa, synthetic construct
TKKKDKHKC

SEQ ID NO: 3484 - protein, 9 aa, synthetic construct
AQKKAKARP

SEQ ID NO: 3485 - protein, 9 aa, synthetic construct
AKKRSKQRP

SEQ ID NO: 3486 - protein, 9 aa, synthetic construct
HCRKARQQP

SEQ ID NO: 3487 - protein, 9 aa, synthetic construct
HKRRSRLKW

SEQ ID NO: 3488 - protein, 9 aa, synthetic construct
HDRRKRSAA

SEQ ID NO: 3489 - protein, 9 aa, synthetic construct
HKRRTRVRP

SEQ ID NO: 3490 - protein, 9 aa, synthetic construct
EKRRKRVQP

SEQ ID NO: 3491 - protein, 9 aa, synthetic construct
HDRKKKTQC

SEQ ID NO: 3492 - protein, 9 aa, synthetic construct
SKRRKRFGP

SEQ ID NO: 3493 - protein, 9 aa, synthetic construct
HQKKLKERP

SEQ ID NO: 3494 - protein, 9 aa, synthetic construct
HLKRKRVKP

SEQ ID NO: 3495 - protein, 9 aa, synthetic construct
HPKRKKQQW

SEQ ID NO: 3496 - protein, 9 aa, synthetic construct
HKRKKKTRL

SEQ ID NO: 3497 - protein, 9 aa, synthetic construct
HPKRLKVRP

SEQ ID NO: 3498 - protein, 9 aa, synthetic construct
HKKKKRTQW

SEQ ID NO: 3499 - protein, 9 aa, synthetic construct
HRKRKRTGP

SEQ ID NO: 3500 - protein, 9 aa, synthetic construct
HKKRKRSKT

SEQ ID NO: 3501 - protein, 9 aa, synthetic construct
HRKRKRMRC

SEQ ID NO: 3502 - protein, 9 aa, synthetic construct
HKKRKRQAA

SEQ ID NO: 3503 - protein, 9 aa, synthetic construct
HKRRARHRT

SEQ ID NO: 3504 - protein, 9 aa, synthetic construct
TKKRKKSRN

SEQ ID NO: 3505 - protein, 9 aa, synthetic construct
QKKRKRQRY

SEQ ID NO: 3506 - protein, 9 aa, synthetic construct
HKKKARQKN

SEQ ID NO: 3507 - protein, 9 aa, synthetic construct
HKKRKRECS

SEQ ID NO: 3508 - protein, 9 aa, synthetic construct
TKKRKRQIC

SEQ ID NO: 3509 - protein, 9 aa, synthetic construct
HDKRKRIKP

SEQ ID NO: 3510 - protein, 9 aa, synthetic construct
HDRRKKMRP

SEQ ID NO: 3511 - protein, 9 aa, synthetic construct
TKRRARTKY

SEQ ID NO: 3512 - protein, 9 aa, synthetic construct
HKKRKKFRP

SEQ ID NO: 3513 - protein, 9 aa, synthetic construct
HKKRARLRP

SEQ ID NO: 3514 - protein, 9 aa, synthetic construct
AKKRARMRP

SEQ ID NO: 3515 - protein, 9 aa, synthetic construct
QRKRARVRN

SEQ ID NO: 3516 - protein, 9 aa, synthetic construct
HPKRKKTKP

SEQ ID NO: 3517 - protein, 9 aa, synthetic construct
TKKKKRFKW

SEQ ID NO: 3518 - protein, 9 aa, synthetic construct
HKKRKKHCP

SEQ ID NO: 3519 - protein, 9 aa, synthetic construct
HQKKKRKCP

SEQ ID NO: 3520 - protein, 9 aa, synthetic construct
HKRRKKTRS

SEQ ID NO: 3521 - protein, 9 aa, synthetic construct
HKKKKKTRT

SEQ ID NO: 3522 - protein, 9 aa, synthetic construct
HDKRKRLQP

SEQ ID NO: 3523 - protein, 9 aa, synthetic construct
CKRKKRTCP

SEQ ID NO: 3524 - protein, 9 aa, synthetic construct
HKKKLQTKN

SEQ ID NO: 3525 - protein, 9 aa, synthetic construct
KPKKKRVNH

SEQ ID NO: 3526 - protein, 9 aa, synthetic construct
TKKKKRTRT

SEQ ID NO: 3527 - protein, 9 aa, synthetic construct
HGKKKRVKP

SEQ ID NO: 3528 - protein, 9 aa, synthetic construct
TKKKKRTRP

SEQ ID NO: 3529 - protein, 9 aa, synthetic construct
HKKKKRTRP

SEQ ID NO: 3530 - protein, 9 aa, synthetic construct
HDKRKKQRE

SEQ ID NO: 3531 - protein, 9 aa, synthetic construct
HKKKKRLRS

SEQ ID NO: 3532 - protein, 9 aa, synthetic construct
HKKRAKLRP

SEQ ID NO: 3533 - protein, 9 aa, synthetic construct
HKKKAKDRP

SEQ ID NO: 3534 - protein, 9 aa, synthetic construct
KKKKKRLRP

SEQ ID NO: 3535 - protein, 9 aa, synthetic construct
MKRKKRFRC

SEQ ID NO: 3536 - protein, 9 aa, synthetic construct
HCKKAKQRP

SEQ ID NO: 3537 - protein, 9 aa, synthetic construct
TRPRKRTKP

SEQ ID NO: 3538 - protein, 9 aa, synthetic construct
HDRKGKQRP

SEQ ID NO: 3539 - protein, 9 aa, synthetic construct
HKRRAKFRT

SEQ ID NO: 3540 - protein, 9 aa, synthetic construct
HRKRGRLRP

SEQ ID NO: 3541 - protein, 9 aa, synthetic construct
HKKRKKQQP

SEQ ID NO: 3542 - protein, 9 aa, synthetic construct
HKKKKRQRS

SEQ ID NO: 3543 - protein, 9 aa, synthetic construct
HDKKARVKP

SEQ ID NO: 3544 - protein, 9 aa, synthetic construct
HEKKGRMRP

SEQ ID NO: 3545 - protein, 9 aa, synthetic construct
KKKRKRHRP

SEQ ID NO: 3546 - protein, 9 aa, synthetic construct
KKRKKRVRP

SEQ ID NO: 3547 - protein, 9 aa, synthetic construct
AKKRLRHRP

SEQ ID NO: 3548 - protein, 9 aa, synthetic construct
HKRKGKFRP

SEQ ID NO: 3549 - protein, 9 aa, synthetic construct
HDRKAKVRP

SEQ ID NO: 3550 - protein, 9 aa, synthetic construct
HQRKKKMQW

SEQ ID NO: 3551 - protein, 9 aa, synthetic construct
HKKRSRQKS

SEQ ID NO: 3552 - protein, 9 aa, synthetic construct
HKKRGRFRE

SEQ ID NO: 3553 - protein, 9 aa, synthetic construct
HKKKKKARW

SEQ ID NO: 3554 - protein, 9 aa, synthetic construct
HCKRARTAH

SEQ ID NO: 3555 - protein, 9 aa, synthetic construct
HKKRQRMRC

SEQ ID NO: 3556 - protein, 9 aa, synthetic construct
HKKRARQAP

SEQ ID NO: 3557 - protein, 9 aa, synthetic construct
HKRRAKVIP

SEQ ID NO: 3558 - protein, 9 aa, synthetic construct
HCRKDKTRW

SEQ ID NO: 3559 - protein, 9 aa, synthetic construct
TKKRARLRP

SEQ ID NO: 3560 - protein, 9 aa, synthetic construct
HRRKKKLAS

SEQ ID NO: 3561 - protein, 9 aa, synthetic construct
HKKRAKQKY

SEQ ID NO: 3562 - protein, 9 aa, synthetic construct
AKKRKKQHP

SEQ ID NO: 3563 - protein, 9 aa, synthetic construct
HPKRKRQKP

SEQ ID NO: 3564 - protein, 9 aa, synthetic construct
HKRKARVRP

SEQ ID NO: 3565 - protein, 9 aa, synthetic construct
HKKKKRARP

SEQ ID NO: 3566 - protein, 9 aa, synthetic construct
HKKKKKMRC

SEQ ID NO: 3567 - protein, 9 aa, synthetic construct
HKKKAKTRP

SEQ ID NO: 3568 - protein, 9 aa, synthetic construct
HQKRKKQRP

SEQ ID NO: 3569 - protein, 9 aa, synthetic construct
HRKKLRCRW

SEQ ID NO: 3570 - protein, 9 aa, synthetic construct
IKKKKKMRS

SEQ ID NO: 3571 - protein, 9 aa, synthetic construct
HKKRSRLRP

SEQ ID NO: 3572 - protein, 9 aa, synthetic construct
HRRKKRVGP

SEQ ID NO: 3573 - protein, 9 aa, synthetic construct
HKRRDRQRS

SEQ ID NO: 3574 - protein, 9 aa, synthetic construct
HQKRGRVRT

SEQ ID NO: 3575 - protein, 9 aa, synthetic construct
HKKRGKMRP

SEQ ID NO: 3576 - protein, 9 aa, synthetic construct
KGRRKKVSG

SEQ ID NO: 3577 - protein, 9 aa, synthetic construct
AQKKVKKFG

SEQ ID NO: 3578 - protein, 9 aa, synthetic construct
HKKRRKVWH

SEQ ID NO: 3579 - protein, 9 aa, synthetic construct
KSKIKKYAG

SEQ ID NO: 3580 - protein, 9 aa, synthetic construct
QNKKKKWSW

SEQ ID NO: 3581 - protein, 9 aa, synthetic construct
HKKKLKWVS

SEQ ID NO: 3582 - protein, 9 aa, synthetic construct
KKKKPVTWG

SEQ ID NO: 3583 - protein, 9 aa, synthetic construct
KVKTKKKWA

SEQ ID NO: 3584 - protein, 9 aa, synthetic construct
KTKKIKSHG

SEQ ID NO: 3585 - protein, 9 aa, synthetic construct
KRKKAARKP

SEQ ID NO: 3586 - protein, 9 aa, synthetic construct
KQKIKKSSG

SEQ ID NO: 3587 - protein, 9 aa, synthetic construct
KKKKTRHQR

SEQ ID NO: 3588 - protein, 9 aa, synthetic construct
KVKKKVCGG

SEQ ID NO: 3589 - protein, 9 aa, synthetic construct
KKRPKRRQC

SEQ ID NO: 3590 - protein, 9 aa, synthetic construct
MAKRKKWRP

SEQ ID NO: 3591 - protein, 9 aa, synthetic construct
KTKKKHTSD

SEQ ID NO: 3592 - protein, 9 aa, synthetic construct
RNKKKKRCW

SEQ ID NO: 3593 - protein, 9 aa, synthetic construct
CKKKKRKGC

SEQ ID NO: 3594 - protein, 9 aa, synthetic construct
KMRKKKCEQ

SEQ ID NO: 3595 - protein, 9 aa, synthetic construct
KKKFVKMTH

SEQ ID NO: 3596 - protein, 9 aa, synthetic construct
KTKAFKKLG

SEQ ID NO: 3597 - protein, 9 aa, synthetic construct
KVKRKRKAG

SEQ ID NO: 3598 - protein, 9 aa, synthetic construct
KVKTCKKPQ

SEQ ID NO: 3599 - protein, 9 aa, synthetic construct
MKKLKKLWC

SEQ ID NO: 3600 - protein, 9 aa, synthetic construct
KWKKKKGIF

SEQ ID NO: 3601 - protein, 9 aa, synthetic construct
FKKKGKAHA

SEQ ID NO: 3602 - protein, 9 aa, synthetic construct
LKKMKKQAC

SEQ ID NO: 3603 - protein, 9 aa, synthetic construct
KTRKTKWSP

SEQ ID NO: 3604 - protein, 9 aa, synthetic construct
KAKWYKKGN

SEQ ID NO: 3605 - protein, 9 aa, synthetic construct
KRKRRRKKS

SEQ ID NO: 3606 - protein, 9 aa, synthetic construct
KKKVWIKSQ

SEQ ID NO: 3607 - protein, 9 aa, synthetic construct
KYKNKKWNS

SEQ ID NO: 3608 - protein, 9 aa, synthetic construct
NVKRYRHAQ

SEQ ID NO: 3609 - protein, 9 aa, synthetic construct
RTKKRRSCG

SEQ ID NO: 3610 - protein, 9 aa, synthetic construct
IPKKKRKWC

SEQ ID NO: 3611 - protein, 9 aa, synthetic construct
KGKLKKHCT

SEQ ID NO: 3612 - protein, 9 aa, synthetic construct
HRKKKRQWS

SEQ ID NO: 3613 - protein, 9 aa, synthetic construct
KPKKAKQQQ

SEQ ID NO: 3614 - protein, 9 aa, synthetic construct
HKKKMGRGH

SEQ ID NO: 3615 - protein, 9 aa, synthetic construct
KKKTRKVQE

SEQ ID NO: 3616 - protein, 9 aa, synthetic construct
NKKHKKRGM

SEQ ID NO: 3617 - protein, 9 aa, synthetic construct
KKKSKITNH

SEQ ID NO: 3618 - protein, 9 aa, synthetic construct
LCKKKKRFQ

SEQ ID NO: 3619 - protein, 9 aa, synthetic construct
KAKRQRWRP

SEQ ID NO: 3620 - protein, 9 aa, synthetic construct
QYKKKKRVS

SEQ ID NO: 3621 - protein, 9 aa, synthetic construct
TKKRRRRMT

SEQ ID NO: 3622 - protein, 9 aa, synthetic construct
KARKLKIQG

SEQ ID NO: 3623 - protein, 9 aa, synthetic construct
KTHRKKKFM

SEQ ID NO: 3624 - protein, 9 aa, synthetic construct
TKRKKKIGP

SEQ ID NO: 3625 - protein, 9 aa, synthetic construct
SKKRNKVCT

SEQ ID NO: 3626 - protein, 9 aa, synthetic construct
KSKFHKQKA

SEQ ID NO: 3627 - protein, 9 aa, synthetic construct
KKLKAKVCM

SEQ ID NO: 3628 - protein, 9 aa, synthetic construct
KLRKKRTRG

SEQ ID NO: 3629 - protein, 9 aa, synthetic construct
HKKRRKSHH

SEQ ID NO: 3630 - protein, 9 aa, synthetic construct
RKKKRYKIV

SEQ ID NO: 3631 - protein, 9 aa, synthetic construct
KKKNKLHVQ

SEQ ID NO: 3632 - protein, 9 aa, synthetic construct
KSKWVKKWH

SEQ ID NO: 3633 - protein, 9 aa, synthetic construct
RKRKKARTP

SEQ ID NO: 3634 - protein, 9 aa, synthetic construct
KKKSKHMQA

SEQ ID NO: 3635 - protein, 9 aa, synthetic construct
KRKRAKVNC

SEQ ID NO: 3636 - protein, 9 aa, synthetic construct
NWKKKKVCT

SEQ ID NO: 3637 - protein, 9 aa, synthetic construct
IKKKKKHND

SEQ ID NO: 3638 - protein, 9 aa, synthetic construct
KHKMKKHVG

SEQ ID NO: 3639 - protein, 9 aa, synthetic construct
KKKKMHPCT

SEQ ID NO: 3640 - protein, 9 aa, synthetic construct
KVKGRKIFK

SEQ ID NO: 3641 - protein, 9 aa, synthetic construct
KKKKLKSWF

SEQ ID NO: 3642 - protein, 9 aa, synthetic construct
NRKRRRKKM

SEQ ID NO: 3643 - protein, 9 aa, synthetic construct
KAKRPKSKA

SEQ ID NO: 3644 - protein, 9 aa, synthetic construct
KKARKKFVA

SEQ ID NO: 3645 - protein, 9 aa, synthetic construct
KKRKIPRKG

SEQ ID NO: 3646 - protein, 9 aa, synthetic construct
GRKKFKIKN

SEQ ID NO: 3647 - protein, 9 aa, synthetic construct
KVKVKKGYW

SEQ ID NO: 3648 - protein, 9 aa, synthetic construct
KVRKEKTKH

SEQ ID NO: 3649 - protein, 9 aa, synthetic construct
MKKKKRLLV

SEQ ID NO: 3650 - protein, 9 aa, synthetic construct
KHRKSKTRT

SEQ ID NO: 3651 - protein, 9 aa, synthetic construct
YKKRRKRWA

SEQ ID NO: 3652 - protein, 9 aa, synthetic construct
KKRGKKFSP

SEQ ID NO: 3653 - protein, 9 aa, synthetic construct
KLKKRGKGG

SEQ ID NO: 3654 - protein, 9 aa, synthetic construct
ATKRKKKAL

SEQ ID NO: 3655 - protein, 9 aa, synthetic construct
KKKKAHATY

SEQ ID NO: 3656 - protein, 9 aa, synthetic construct
KHKKKHYHN

SEQ ID NO: 3657 - protein, 9 aa, synthetic construct
HRKRTRYGC

SEQ ID NO: 3658 - protein, 9 aa, synthetic construct
KMKRKKSNQ

SEQ ID NO: 3659 - protein, 9 aa, synthetic construct
KRKRQKQYQ

SEQ ID NO: 3660 - protein, 9 aa, synthetic construct
AHKKKKHLT

SEQ ID NO: 3661 - protein, 9 aa, synthetic construct
KSRKSKGKG

SEQ ID NO: 3662 - protein, 9 aa, synthetic construct
QTKRRKKGC

SEQ ID NO: 3663 - protein, 9 aa, synthetic construct
KGKKFKKGV

SEQ ID NO: 3664 - protein, 9 aa, synthetic construct
KAKQKWVKF

SEQ ID NO: 3665 - protein, 9 aa, synthetic construct
RVKRCRRCA

SEQ ID NO: 3666 - protein, 9 aa, synthetic construct
RAKRPRRQW

SEQ ID NO: 3667 - protein, 9 aa, synthetic construct
KQKKKQYPQ

SEQ ID NO: 3668 - protein, 9 aa, synthetic construct
KVKRWRGQQ

SEQ ID NO: 3669 - protein, 9 aa, synthetic construct
CKRRRKRYI

SEQ ID NO: 3670 - protein, 9 aa, synthetic construct
KKKYRKRRG

SEQ ID NO: 3671 - protein, 9 aa, synthetic construct
KRRKKGNAT

SEQ ID NO: 3672 - protein, 9 aa, synthetic construct
SKKRLKSHG

SEQ ID NO: 3673 - protein, 9 aa, synthetic construct
KKKRKSHNS

SEQ ID NO: 3674 - protein, 9 aa, synthetic construct
KKKDQKACV

SEQ ID NO: 3675 - protein, 9 aa, synthetic construct
LRKKKKQTG

SEQ ID NO: 3676 - protein, 9 aa, synthetic construct
TRKRKKKVK

SEQ ID NO: 3677 - protein, 9 aa, synthetic construct
VKKKQKSHE

SEQ ID NO: 3678 - protein, 9 aa, synthetic construct
KKKKFKNVE

SEQ ID NO: 3679 - protein, 9 aa, synthetic construct
RAKQKKKQS

SEQ ID NO: 3680 - protein, 9 aa, synthetic construct
KMRKSKVCP

SEQ ID NO: 3681 - protein, 9 aa, synthetic construct
ARKRKKSCC

SEQ ID NO: 3682 - protein, 9 aa, synthetic construct
MKHKKKWCH

SEQ ID NO: 3683 - protein, 9 aa, synthetic construct
QHKKKKRYA

SEQ ID NO: 3684 - protein, 9 aa, synthetic construct
KRKMIKKCM

SEQ ID NO: 3685 - protein, 9 aa, synthetic construct
KKMKKRQTG

SEQ ID NO: 3686 - protein, 9 aa, synthetic construct
KNKKKKKMC

SEQ ID NO: 3687 - protein, 9 aa, synthetic construct
KCKRKRRRG

SEQ ID NO: 3688 - protein, 9 aa, synthetic construct
AKKKRKVIM

SEQ ID NO: 3689 - protein, 9 aa, synthetic construct
HRRKQRRYQ

SEQ ID NO: 3690 - protein, 9 aa, synthetic construct
KKRKQKRGM

SEQ ID NO: 3691 - protein, 9 aa, synthetic construct
KKARKTKSH

SEQ ID NO: 3692 - protein, 9 aa, synthetic construct
KKRKFNRAA

SEQ ID NO: 3693 - protein, 9 aa, synthetic construct
KRKKSRSYG

SEQ ID NO: 3694 - protein, 9 aa, synthetic construct
MKKVKKKTG

SEQ ID NO: 3695 - protein, 9 aa, synthetic construct
KGRRQKRAA

SEQ ID NO: 3696 - protein, 9 aa, synthetic construct
KNKKKREAT

SEQ ID NO: 3697 - protein, 9 aa, synthetic construct
YKKMKRKQV

SEQ ID NO: 3698 - protein, 9 aa, synthetic construct
KRKKKPNDQ

SEQ ID NO: 3699 - protein, 9 aa, synthetic construct
NKRKKRGGP

SEQ ID NO: 3700 - protein, 9 aa, synthetic construct
TARKKKCKM

SEQ ID NO: 3701 - protein, 9 aa, synthetic construct
STKRKKKGN

SEQ ID NO: 3702 - protein, 9 aa, synthetic construct
HKKRGRSMH

SEQ ID NO: 3703 - protein, 9 aa, synthetic construct
KKRKYHCDW

SEQ ID NO: 3704 - protein, 9 aa, synthetic construct
KCKSKKKIA

SEQ ID NO: 3705 - protein, 9 aa, synthetic construct
YKRKWKHCE

SEQ ID NO: 3706 - protein, 9 aa, synthetic construct
TIKKFKRKH

SEQ ID NO: 3707 - protein, 9 aa, synthetic construct
RAKRKRKNM

SEQ ID NO: 3708 - protein, 9 aa, synthetic construct
AKKRKKDWS

SEQ ID NO: 3709 - protein, 9 aa, synthetic construct
KARKARRFF

SEQ ID NO: 3710 - protein, 9 aa, synthetic construct
KKKKHLSNM

SEQ ID NO: 3711 - protein, 9 aa, synthetic construct
KKKALKRPM

SEQ ID NO: 3712 - protein, 9 aa, synthetic construct
KGKRQKKQE

SEQ ID NO: 3713 - protein, 9 aa, synthetic construct
CHKNFKKKG

SEQ ID NO: 3714 - protein, 9 aa, synthetic construct
KKKTNKCTN

SEQ ID NO: 3715 - protein, 9 aa, synthetic construct
RTKKRKCFA

SEQ ID NO: 3716 - protein, 9 aa, synthetic construct
RIRKRKQRQ

SEQ ID NO: 3717 - protein, 9 aa, synthetic construct
KKRIMKKSH

SEQ ID NO: 3718 - protein, 9 aa, synthetic construct
APRKKKEKG

SEQ ID NO: 3719 - protein, 9 aa, synthetic construct
KTKKFKWRV

SEQ ID NO: 3720 - protein, 9 aa, synthetic construct
QKRKEKKCC

SEQ ID NO: 3721 - protein, 9 aa, synthetic construct
LKKRKRVAA

SEQ ID NO: 3722 - protein, 9 aa, synthetic construct
RVKRKRYWQ

SEQ ID NO: 3723 - protein, 9 aa, synthetic construct
CKKLWKKHH

SEQ ID NO: 3724 - protein, 9 aa, synthetic construct
KKKWIRRKD

SEQ ID NO: 3725 - protein, 9 aa, synthetic construct
KLRKMKKTP

SEQ ID NO: 3726 - protein, 9 aa, synthetic construct
RKKKKAWAT

SEQ ID NO: 3727 - protein, 9 aa, synthetic construct
KVKKWGWKT

SEQ ID NO: 3728 - protein, 9 aa, synthetic construct
IKKKIKIAG

SEQ ID NO: 3729 - protein, 9 aa, synthetic construct
RVKRARHYS

SEQ ID NO: 3730 - protein, 9 aa, synthetic construct
KKRRCQRGQ

SEQ ID NO: 3731 - protein, 9 aa, synthetic construct
KKKKWWQCA

SEQ ID NO: 3732 - protein, 9 aa, synthetic construct
KAKFTKKYQ

SEQ ID NO: 3733 - protein, 9 aa, synthetic construct
RRKKAKHCS

SEQ ID NO: 3734 - protein, 9 aa, synthetic construct
KRKKYKWQL

SEQ ID NO: 3735 - protein, 9 aa, synthetic construct
TKAKKKAPV

SEQ ID NO: 3736 - protein, 9 aa, synthetic construct
IRRKKKNGS

SEQ ID NO: 3737 - protein, 9 aa, synthetic construct
HKKRKRCNN

SEQ ID NO: 3738 - protein, 9 aa, synthetic construct
QSKRKKRKW

SEQ ID NO: 3739 - protein, 9 aa, synthetic construct
RHRKKRQYP

SEQ ID NO: 3740 - protein, 9 aa, synthetic construct
KQRKKKTAN

SEQ ID NO: 3741 - protein, 9 aa, synthetic construct
KARAKKLKA

SEQ ID NO: 3742 - protein, 9 aa, synthetic construct
KKRRYRHEY

SEQ ID NO: 3743 - protein, 9 aa, synthetic construct
KRKRRHHTH

SEQ ID NO: 3744 - protein, 9 aa, synthetic construct
KKKGYKCMW

SEQ ID NO: 3745 - protein, 9 aa, synthetic construct
KVKKAKQIF

SEQ ID NO: 3746 - protein, 9 aa, synthetic construct
KKKVKMHIG

SEQ ID NO: 3747 - protein, 9 aa, synthetic construct
VYKNKKVKS

SEQ ID NO: 3748 - protein, 9 aa, synthetic construct
KKHKTKAHH

SEQ ID NO: 3749 - protein, 9 aa, synthetic construct
MAKKKKWQI

SEQ ID NO: 3750 - protein, 9 aa, synthetic construct
RKRKIRRNC

SEQ ID NO: 3751 - protein, 9 aa, synthetic construct
KKKKCRLQW

SEQ ID NO: 3752 - protein, 9 aa, synthetic construct
KKKRNKAWW

SEQ ID NO: 3753 - protein, 9 aa, synthetic construct
KKKRKDRAY

SEQ ID NO: 3754 - protein, 9 aa, synthetic construct
CKKTKKYFT

SEQ ID NO: 3755 - protein, 9 aa, synthetic construct
MKKKQKNTY

SEQ ID NO: 3756 - protein, 9 aa, synthetic construct
KKKGKGINS

SEQ ID NO: 3757 - protein, 9 aa, synthetic construct
CKKGRKKWM

SEQ ID NO: 3758 - protein, 9 aa, synthetic construct
KKRRYKCAH

SEQ ID NO: 3759 - protein, 9 aa, synthetic construct
QAKKKKKQG

SEQ ID NO: 3760 - protein, 9 aa, synthetic construct
KKKRKARMD

SEQ ID NO: 3761 - protein, 9 aa, synthetic construct
RMKRRRHSS

SEQ ID NO: 3762 - protein, 9 aa, synthetic construct
TNKPKKCKG

SEQ ID NO: 3763 - protein, 9 aa, synthetic construct
PKKRKFVKG

SEQ ID NO: 3764 - protein, 9 aa, synthetic construct
KKRKGTGGW

SEQ ID NO: 3765 - protein, 9 aa, synthetic construct
NKKVQKKPC

SEQ ID NO: 3766 - protein, 9 aa, synthetic construct
TGKKKKWQP

SEQ ID NO: 3767 - protein, 9 aa, synthetic construct
QGKKKKVNG

SEQ ID NO: 3768 - protein, 9 aa, synthetic construct
KYRKWKRTM

SEQ ID NO: 3769 - protein, 9 aa, synthetic construct
KRRRARQSS

SEQ ID NO: 3770 - protein, 9 aa, synthetic construct
KSKKNSYKN

SEQ ID NO: 3771 - protein, 9 aa, synthetic construct
KSKVTKTKG

SEQ ID NO: 3772 - protein, 9 aa, synthetic construct
KSRKRRTQW

SEQ ID NO: 3773 - protein, 9 aa, synthetic construct
KKKQNKWKW

SEQ ID NO: 3774 - protein, 9 aa, synthetic construct
KNKFTKMKS

SEQ ID NO: 3775 - protein, 9 aa, synthetic construct
MKKMKKCSG

SEQ ID NO: 3776 - protein, 9 aa, synthetic construct
KMKRKKGQS

SEQ ID NO: 3777 - protein, 9 aa, synthetic construct
KKLRKKSCG

SEQ ID NO: 3778 - protein, 9 aa, synthetic construct
KFKKKHIME

SEQ ID NO: 3779 - protein, 9 aa, synthetic construct
KVKWNKKCT

SEQ ID NO: 3780 - protein, 9 aa, synthetic construct
KAKKKVRLC

SEQ ID NO: 3781 - protein, 9 aa, synthetic construct
KKKHTTSKG

SEQ ID NO: 3782 - protein, 9 aa, synthetic construct
HKKRRARAH

SEQ ID NO: 3783 - protein, 9 aa, synthetic construct
NKKRKRGHY

SEQ ID NO: 3784 - protein, 9 aa, synthetic construct
KKKKRFHFN

SEQ ID NO: 3785 - protein, 9 aa, synthetic construct
KCKRKHVAS

SEQ ID NO: 3786 - protein, 9 aa, synthetic construct
HKKKVKSHN

SEQ ID NO: 3787 - protein, 9 aa, synthetic construct
VVKWKKCKT

SEQ ID NO: 3788 - protein, 9 aa, synthetic construct
KSKNKKGCN

SEQ ID NO: 3789 - protein, 9 aa, synthetic construct
KCKKKQNHV

SEQ ID NO: 3790 - protein, 9 aa, synthetic construct
KGKRKRKHS

SEQ ID NO: 3791 - protein, 9 aa, synthetic construct
KIRKHKKDN

SEQ ID NO: 3792 - protein, 9 aa, synthetic construct
NKRKRKYKG

SEQ ID NO: 3793 - protein, 9 aa, synthetic construct
KVKWKQKVG

SEQ ID NO: 3794 - protein, 9 aa, synthetic construct
KMKHKKHSA

SEQ ID NO: 3795 - protein, 9 aa, synthetic construct
AKKAQKQKQ

SEQ ID NO: 3796 - protein, 9 aa, synthetic construct
KKKAKSYDN

SEQ ID NO: 3797 - protein, 9 aa, synthetic construct
KSKTFKYGG

SEQ ID NO: 3798 - protein, 9 aa, synthetic construct
KTKPKKCGG

SEQ ID NO: 3799 - protein, 9 aa, synthetic construct
KAKRKTFVS

SEQ ID NO: 3800 - protein, 9 aa, synthetic construct
KVRKKRQHA

SEQ ID NO: 3801 - protein, 9 aa, synthetic construct
KTRKYKIYQ

SEQ ID NO: 3802 - protein, 9 aa, synthetic construct
KKKKSMRHR

SEQ ID NO: 3803 - protein, 9 aa, synthetic construct
QKKKKSCHG

SEQ ID NO: 3804 - protein, 9 aa, synthetic construct
HKGKKKALG

SEQ ID NO: 3805 - protein, 9 aa, synthetic construct
KVKMRKKNT

SEQ ID NO: 3806 - protein, 9 aa, synthetic construct
KRKNKKSFW

SEQ ID NO: 3807 - protein, 9 aa, synthetic construct
YVKRRKKKN

SEQ ID NO: 3808 - protein, 9 aa, synthetic construct
KKKCKWGMM

SEQ ID NO: 3809 - protein, 9 aa, synthetic construct
GKKGNKCKQ

SEQ ID NO: 3810 - protein, 9 aa, synthetic construct
VKKKIKVST

SEQ ID NO: 3811 - protein, 9 aa, synthetic construct
KWKRKCKGQ

SEQ ID NO: 3812 - protein, 9 aa, synthetic construct
KKQKKRTYT

SEQ ID NO: 3813 - protein, 9 aa, synthetic construct
KTRAKKKTT

SEQ ID NO: 3814 - protein, 9 aa, synthetic construct
KKKKYHHDT

SEQ ID NO: 3815 - protein, 9 aa, synthetic construct
WKKRKKAGF

SEQ ID NO: 3816 - protein, 9 aa, synthetic construct
CCKTKKQKG

SEQ ID NO: 3817 - protein, 9 aa, synthetic construct
KARRRKRYP

SEQ ID NO: 3818 - protein, 9 aa, synthetic construct
KKKKTRVIE

SEQ ID NO: 3819 - protein, 9 aa, synthetic construct
QQKAKKCKG

SEQ ID NO: 3820 - protein, 9 aa, synthetic construct
KCKKKIRWT

SEQ ID NO: 3821 - protein, 9 aa, synthetic construct
KKKLKRRAN

SEQ ID NO: 3822 - protein, 9 aa, synthetic construct
VAKRRRKCC

SEQ ID NO: 3823 - protein, 9 aa, synthetic construct
KQKKSKYTH

SEQ ID NO: 3824 - protein, 9 aa, synthetic construct
KKKMRKREH

SEQ ID NO: 3825 - protein, 9 aa, synthetic construct
KRKKKWKAH

SEQ ID NO: 3826 - protein, 9 aa, synthetic construct
KRMKKKRAY

SEQ ID NO: 3827 - protein, 9 aa, synthetic construct
SRKKKKKMS

SEQ ID NO: 3828 - protein, 9 aa, synthetic construct
KKKQGRFKE

SEQ ID NO: 3829 - protein, 9 aa, synthetic construct
GIRKKKKTT

SEQ ID NO: 3830 - protein, 9 aa, synthetic construct
LVKPKKKAQ

SEQ ID NO: 3831 - protein, 9 aa, synthetic construct
KIKGRKKHC

SEQ ID NO: 3832 - protein, 9 aa, synthetic construct
KGKCKKTHH

SEQ ID NO: 3833 - protein, 9 aa, synthetic construct
KLKKRKSVN

SEQ ID NO: 3834 - protein, 9 aa, synthetic construct
KARKSKRAT

SEQ ID NO: 3835 - protein, 9 aa, synthetic construct
KPRKKKGSE

SEQ ID NO: 3836 - protein, 9 aa, synthetic construct
KRKRMRNMH

SEQ ID NO: 3837 - protein, 9 aa, synthetic construct
HKRKKPPKE

SEQ ID NO: 3838 - protein, 9 aa, synthetic construct
KKKSKYSGV

SEQ ID NO: 3839 - protein, 9 aa, synthetic construct
RSRKKRRGM

SEQ ID NO: 3840 - protein, 9 aa, synthetic construct
KRKRHKHQS

SEQ ID NO: 3841 - protein, 9 aa, synthetic construct
HKRKGKSKW

SEQ ID NO: 3842 - protein, 9 aa, synthetic construct
KKRKLKWFW

SEQ ID NO: 3843 - protein, 9 aa, synthetic construct
KQKVKKENC

SEQ ID NO: 3844 - protein, 9 aa, synthetic construct
GKKKGKRMN

SEQ ID NO: 3845 - protein, 9 aa, synthetic construct
KHKKCIKCA

SEQ ID NO: 3846 - protein, 9 aa, synthetic construct
KTRKRRAYC

SEQ ID NO: 3847 - protein, 9 aa, synthetic construct
SKKTYKKAY

SEQ ID NO: 3848 - protein, 9 aa, synthetic construct
TKKKGKQYH

SEQ ID NO: 3849 - protein, 9 aa, synthetic construct
KIKMKKLQF

SEQ ID NO: 3850 - protein, 9 aa, synthetic construct
KSRMKKLKT

SEQ ID NO: 3851 - protein, 9 aa, synthetic construct
KKRRRWRYM

SEQ ID NO: 3852 - protein, 9 aa, synthetic construct
SKKRVKSSG

SEQ ID NO: 3853 - protein, 9 aa, synthetic construct
KNKRKKNHD

SEQ ID NO: 3854 - protein, 9 aa, synthetic construct
MKHKKKQQN

SEQ ID NO: 3855 - protein, 9 aa, synthetic construct
RTKKRRRQH

SEQ ID NO: 3856 - protein, 9 aa, synthetic construct
KQKIKKMGF

SEQ ID NO: 3857 - protein, 9 aa, synthetic construct
QSRKKKRNS

SEQ ID NO: 3858 - protein, 9 aa, synthetic construct
KGKKRKQMH

SEQ ID NO: 3859 - protein, 9 aa, synthetic construct
YNKKKKHSG

SEQ ID NO: 3860 - protein, 9 aa, synthetic construct
KGKAKKRRH

SEQ ID NO: 3861 - protein, 9 aa, synthetic construct
KKAKGKAYP

SEQ ID NO: 3862 - protein, 9 aa, synthetic construct
MIKIKKKGT

SEQ ID NO: 3863 - protein, 9 aa, synthetic construct
KKKKVYRYS

SEQ ID NO: 3864 - protein, 9 aa, synthetic construct
KKKKTVPAW

SEQ ID NO: 3865 - protein, 9 aa, synthetic construct
CFKKRKKGV

SEQ ID NO: 3866 - protein, 9 aa, synthetic construct
KCKRTKKRN

SEQ ID NO: 3867 - protein, 9 aa, synthetic construct
KVKCKKHSG

SEQ ID NO: 3868 - protein, 9 aa, synthetic construct
KVKKMKSMW

SEQ ID NO: 3869 - protein, 9 aa, synthetic construct
KVRRYKRLS

SEQ ID NO: 3870 - protein, 9 aa, synthetic construct
NKQRKKKQC

SEQ ID NO: 3871 - protein, 9 aa, synthetic construct
KAKTKRHKD

SEQ ID NO: 3872 - protein, 9 aa, synthetic construct
KVKRMKMTA

SEQ ID NO: 3873 - protein, 9 aa, synthetic construct
MKKKKVRYH

SEQ ID NO: 3874 - protein, 9 aa, synthetic construct
KSKCKKGRA

SEQ ID NO: 3875 - protein, 9 aa, synthetic construct
TCKWKKAKH

SEQ ID NO: 3876 - protein, 9 aa, synthetic construct
KVKRVRKYW

SEQ ID NO: 3877 - protein, 9 aa, synthetic construct
FKKKTKCMG

SEQ ID NO: 3878 - protein, 9 aa, synthetic construct
KTKKKTTMF

SEQ ID NO: 3879 - protein, 9 aa, synthetic construct
MRRKKKQVY

SEQ ID NO: 3880 - protein, 9 aa, synthetic construct
KKKRKRRES

SEQ ID NO: 3881 - protein, 9 aa, synthetic construct
RKKKKKAGD

SEQ ID NO: 3882 - protein, 9 aa, synthetic construct
CGRKKKRCD

SEQ ID NO: 3883 - protein, 9 aa, synthetic construct
KVKKRKMYM

SEQ ID NO: 3884 - protein, 9 aa, synthetic construct
KKKRKKIGL

SEQ ID NO: 3885 - protein, 9 aa, synthetic construct
HKKRRRYPY

SEQ ID NO: 3886 - protein, 9 aa, synthetic construct
KKKKAHCSC

SEQ ID NO: 3887 - protein, 9 aa, synthetic construct
KVRKTKACI

SEQ ID NO: 3888 - protein, 9 aa, synthetic construct
SQKKKRVKH

SEQ ID NO: 3889 - protein, 9 aa, synthetic construct
LMRKKKQVP

SEQ ID NO: 3890 - protein, 9 aa, synthetic construct
KKKAKSTDC

SEQ ID NO: 3891 - protein, 9 aa, synthetic construct
CRKKKKAHV

SEQ ID NO: 3892 - protein, 9 aa, synthetic construct
KKKCRKHQY

SEQ ID NO: 3893 - protein, 9 aa, synthetic construct
KARKKFKTN

SEQ ID NO: 3894 - protein, 9 aa, synthetic construct
KGRKKRHPG

SEQ ID NO: 3895 - protein, 9 aa, synthetic construct
KVKKSKHMM

SEQ ID NO: 3896 - protein, 9 aa, synthetic construct
KRKQKFAKH

SEQ ID NO: 3897 - protein, 9 aa, synthetic construct
KNRMKKKHC

SEQ ID NO: 3898 - protein, 9 aa, synthetic construct
LCKSFKKKF

SEQ ID NO: 3899 - protein, 9 aa, synthetic construct
KAKKRRQFH

SEQ ID NO: 3900 - protein, 9 aa, synthetic construct
KLKRRRRHS

SEQ ID NO: 3901 - protein, 9 aa, synthetic construct
EKKKKRRVC

SEQ ID NO: 3902 - protein, 9 aa, synthetic construct
KASKKKRYH

SEQ ID NO: 3903 - protein, 9 aa, synthetic construct
GIKKKKSVM

SEQ ID NO: 3904 - protein, 9 aa, synthetic construct
TKKRKRVKM

SEQ ID NO: 3905 - protein, 9 aa, synthetic construct
VCKKKKMKH

SEQ ID NO: 3906 - protein, 9 aa, synthetic construct
HIKKKKGFG

SEQ ID NO: 3907 - protein, 9 aa, synthetic construct
KKRQKKMCA

SEQ ID NO: 3908 - protein, 9 aa, synthetic construct
CKKKMKTGW

SEQ ID NO: 3909 - protein, 9 aa, synthetic construct
HKRRRFTGY

SEQ ID NO: 3910 - protein, 9 aa, synthetic construct
KRRKHKKMM

SEQ ID NO: 3911 - protein, 9 aa, synthetic construct
QCKKQKQKS

SEQ ID NO: 3912 - protein, 9 aa, synthetic construct
IKRRKKCMH

SEQ ID NO: 3913 - protein, 9 aa, synthetic construct
KNKAQKKPA

SEQ ID NO: 3914 - protein, 9 aa, synthetic construct
KWKKMKLFM

SEQ ID NO: 3915 - protein, 9 aa, synthetic construct
KRRRRARGW

SEQ ID NO: 3916 - protein, 9 aa, synthetic construct
KVKGRKKYP

SEQ ID NO: 3917 - protein, 9 aa, synthetic construct
NKKHKKCHS

SEQ ID NO: 3918 - protein, 9 aa, synthetic construct
KKKRVGQVA

SEQ ID NO: 3919 - protein, 9 aa, synthetic construct
KAKPKKNHC

SEQ ID NO: 3920 - protein, 9 aa, synthetic construct
TMKRKKHQC

SEQ ID NO: 3921 - protein, 9 aa, synthetic construct
KRKGVKKRQ

SEQ ID NO: 3922 - protein, 9 aa, synthetic construct
KRKKMTKSL

SEQ ID NO: 3923 - protein, 9 aa, synthetic construct
KKRRQKTVQ

SEQ ID NO: 3924 - protein, 9 aa, synthetic construct
RVRRRKSTG

SEQ ID NO: 3925 - protein, 9 aa, synthetic construct
ATKKKRKNM

SEQ ID NO: 3926 - protein, 9 aa, synthetic construct
KKKFKNWTY

SEQ ID NO: 3927 - protein, 9 aa, synthetic construct
RTKRYRWRC

SEQ ID NO: 3928 - protein, 9 aa, synthetic construct
RTKAKKTKS

SEQ ID NO: 3929 - protein, 9 aa, synthetic construct
KKKMGKKCN

SEQ ID NO: 3930 - protein, 9 aa, synthetic construct
KAKRFKLYT

SEQ ID NO: 3931 - protein, 9 aa, synthetic construct
KKKKCWMEQ

SEQ ID NO: 3932 - protein, 9 aa, synthetic construct
KGKKNKMIY

SEQ ID NO: 3933 - protein, 9 aa, synthetic construct
KKKRVSWSC

SEQ ID NO: 3934 - protein, 9 aa, synthetic construct
RHKKKKDAH

SEQ ID NO: 3935 - protein, 9 aa, synthetic construct
KKKWKASQC

SEQ ID NO: 3936 - protein, 9 aa, synthetic construct
KSKKFKLSY

SEQ ID NO: 3937 - protein, 9 aa, synthetic construct
KTRKVKWCM

SEQ ID NO: 3938 - protein, 9 aa, synthetic construct
RKKKKRRSM

SEQ ID NO: 3939 - protein, 9 aa, synthetic construct
RFKKKKRFA

SEQ ID NO: 3940 - protein, 9 aa, synthetic construct
KFKKKCYAW

SEQ ID NO: 3941 - protein, 9 aa, synthetic construct
KKKKSRTRH

SEQ ID NO: 3942 - protein, 9 aa, synthetic construct
HKRKKSWHL

SEQ ID NO: 3943 - protein, 9 aa, synthetic construct
KKKRNRRSA

SEQ ID NO: 3944 - protein, 9 aa, synthetic construct
RKKRVRNSH

SEQ ID NO: 3945 - protein, 9 aa, synthetic construct
CKRKKKHTL

SEQ ID NO: 3946 - protein, 9 aa, synthetic construct
HKRKQRQRC

SEQ ID NO: 3947 - protein, 9 aa, synthetic construct
AKKKKKHKP

SEQ ID NO: 3948 - protein, 9 aa, synthetic construct
KWKMKKWMP

SEQ ID NO: 3949 - protein, 9 aa, synthetic construct
RRKRRHSAT

SEQ ID NO: 3950 - protein, 9 aa, synthetic construct
RIKRKRWSS

SEQ ID NO: 3951 - protein, 9 aa, synthetic construct
HKKYCKKTS

SEQ ID NO: 3952 - protein, 9 aa, synthetic construct
RVRRRKWCE

SEQ ID NO: 3953 - protein, 9 aa, synthetic construct
KSKRCKFKQ

SEQ ID NO: 3954 - protein, 9 aa, synthetic construct
KKKKMMCNH

SEQ ID NO: 3955 - protein, 9 aa, synthetic construct
KVKKVRKYH

SEQ ID NO: 3956 - protein, 9 aa, synthetic construct
KKKKVFKTH

SEQ ID NO: 3957 - protein, 9 aa, synthetic construct
KTKKKSYDM

SEQ ID NO: 3958 - protein, 9 aa, synthetic construct
KTKLKKMFS

SEQ ID NO: 3959 - protein, 9 aa, synthetic construct
TKKTMKKAN

SEQ ID NO: 3960 - protein, 9 aa, synthetic construct
ARKKKKKRG

SEQ ID NO: 3961 - protein, 9 aa, synthetic construct
KWRKAKAKY

SEQ ID NO: 3962 - protein, 9 aa, synthetic construct
KKRKQKSTH

SEQ ID NO: 3963 - protein, 9 aa, synthetic construct
KRKRKITSD

SEQ ID NO: 3964 - protein, 9 aa, synthetic construct
RAKRIRIRC

SEQ ID NO: 3965 - protein, 9 aa, synthetic construct
KTKTLKTKF

SEQ ID NO: 3966 - protein, 9 aa, synthetic construct
QARKKKRLG

SEQ ID NO: 3967 - protein, 9 aa, synthetic construct
KTKKKLMGN

SEQ ID NO: 3968 - protein, 9 aa, synthetic construct
IKKRRKLHP

SEQ ID NO: 3969 - protein, 9 aa, synthetic construct
KKKKKFRCS

SEQ ID NO: 3970 - protein, 9 aa, synthetic construct
KQKFGKKAG

SEQ ID NO: 3971 - protein, 9 aa, synthetic construct
KKRKIVCGY

SEQ ID NO: 3972 - protein, 9 aa, synthetic construct
KKRGKKKGH

SEQ ID NO: 3973 - protein, 9 aa, synthetic construct
KKKGQKGYA

SEQ ID NO: 3974 - protein, 9 aa, synthetic construct
LRRRKKNRY

SEQ ID NO: 3975 - protein, 9 aa, synthetic construct
KVKKIKNRD

SEQ ID NO: 3976 - protein, 9 aa, synthetic construct
KRKRFKNDK

SEQ ID NO: 3977 - protein, 9 aa, synthetic construct
KRRKTNRQP

SEQ ID NO: 3978 - protein, 9 aa, synthetic construct
KTKRYRFHN

SEQ ID NO: 3979 - protein, 9 aa, synthetic construct
KARRKRCQC

SEQ ID NO: 3980 - protein, 9 aa, synthetic construct
KTKKRRSSN

SEQ ID NO: 3981 - protein, 9 aa, synthetic construct
QVKKKKRLM

SEQ ID NO: 3982 - protein, 9 aa, synthetic construct
KVKRKKIGW

SEQ ID NO: 3983 - protein, 9 aa, synthetic construct
RSRKRKSYV

SEQ ID NO: 3984 - protein, 9 aa, synthetic construct
KRRKFKRSD

SEQ ID NO: 3985 - protein, 9 aa, synthetic construct
MKMKKKRGH

SEQ ID NO: 3986 - protein, 9 aa, synthetic construct
KKKKFIKSL

SEQ ID NO: 3987 - protein, 9 aa, synthetic construct
KVKRRKRRM

SEQ ID NO: 3988 - protein, 9 aa, synthetic construct
KVKKGQQKC

SEQ ID NO: 3989 - protein, 9 aa, synthetic construct
VKKSVKKIC

SEQ ID NO: 3990 - protein, 9 aa, synthetic construct
KKKAKHGWE

SEQ ID NO: 3991 - protein, 9 aa, synthetic construct
KTKRKRAYW

SEQ ID NO: 3992 - protein, 9 aa, synthetic construct
KKFKCKNSW

SEQ ID NO: 3993 - protein, 9 aa, synthetic construct
RRKRFRFYS

SEQ ID NO: 3994 - protein, 9 aa, synthetic construct
TRRKGKRCN

SEQ ID NO: 3995 - protein, 9 aa, synthetic construct
KKKKMYHSS

SEQ ID NO: 3996 - protein, 9 aa, synthetic construct
KVRKKKDHC

SEQ ID NO: 3997 - protein, 9 aa, synthetic construct
SKKRYKRGS

SEQ ID NO: 3998 - protein, 9 aa, synthetic construct
KNKKCKFSN

SEQ ID NO: 3999 - protein, 9 aa, synthetic construct
HKRKSQHHA

SEQ ID NO: 4000 - protein, 9 aa, synthetic construct
KVKKKRLSA

SEQ ID NO: 4001 - protein, 9 aa, synthetic construct
KAKRKRRHN

SEQ ID NO: 4002 - protein, 9 aa, synthetic construct
RAKKKKRAG

SEQ ID NO: 4003 - protein, 9 aa, synthetic construct
KRRRQRRHH

SEQ ID NO: 4004 - protein, 9 aa, synthetic construct
KTKKKAKCV

SEQ ID NO: 4005 - protein, 9 aa, synthetic construct
KVKKYKAHY

SEQ ID NO: 4006 - protein, 9 aa, synthetic construct
KLKKKRRYF

SEQ ID NO: 4007 - protein, 9 aa, synthetic construct
RVKKKRQAE

SEQ ID NO: 4008 - protein, 9 aa, synthetic construct
KNKKVVKHH

SEQ ID NO: 4009 - protein, 9 aa, synthetic construct
KFKKMRKAT

SEQ ID NO: 4010 - protein, 9 aa, synthetic construct
KKKKRSYMP

SEQ ID NO: 4011 - protein, 9 aa, synthetic construct
KMKSKKCAG

SEQ ID NO: 4012 - protein, 9 aa, synthetic construct
RKKKKQLGI

SEQ ID NO: 4013 - protein, 9 aa, synthetic construct
KFRKRKIYS

SEQ ID NO: 4014 - protein, 9 aa, synthetic construct
KIRKRRQHT

SEQ ID NO: 4015 - protein, 9 aa, synthetic construct
KRKKKMRPA

SEQ ID NO: 4016 - protein, 9 aa, synthetic construct
KAKKQKTTE

SEQ ID NO: 4017 - protein, 9 aa, synthetic construct
SMKKFKKMS

SEQ ID NO: 4018 - protein, 9 aa, synthetic construct
KKKVLKTVE

SEQ ID NO: 4019 - protein, 9 aa, synthetic construct
KSKVKKHGW

SEQ ID NO: 4020 - protein, 9 aa, synthetic construct
KQKKIIKCF

SEQ ID NO: 4021 - protein, 9 aa, synthetic construct
KRKKNKMGP

SEQ ID NO: 4022 - protein, 9 aa, synthetic construct
KSKKNKWQQ

SEQ ID NO: 4023 - protein, 9 aa, synthetic construct
KKKRIQCHV

SEQ ID NO: 4024 - protein, 9 aa, synthetic construct
KIKTKKKMA

SEQ ID NO: 4025 - protein, 9 aa, synthetic construct
KRKRCVWRS

SEQ ID NO: 4026 - protein, 9 aa, synthetic construct
KKRKKNTFS

SEQ ID NO: 4027 - protein, 9 aa, synthetic construct
PKKKKRWTP

SEQ ID NO: 4028 - protein, 9 aa, synthetic construct
VKKSKKQTN

SEQ ID NO: 4029 - protein, 9 aa, synthetic construct
KKKAKHIEC

SEQ ID NO: 4030 - protein, 9 aa, synthetic construct
KAKKNKGHY

SEQ ID NO: 4031 - protein, 9 aa, synthetic construct
VKHRKKVKY

SEQ ID NO: 4032 - protein, 9 aa, synthetic construct
KTKQKKHCC

SEQ ID NO: 4033 - protein, 9 aa, synthetic construct
KTHKKKGSY

SEQ ID NO: 4034 - protein, 9 aa, synthetic construct
IKKSKKAFG

SEQ ID NO: 4035 - protein, 9 aa, synthetic construct
TRKIKKQKG

SEQ ID NO: 4036 - protein, 9 aa, synthetic construct
KAKKMKMSW

SEQ ID NO: 4037 - protein, 9 aa, synthetic construct
KKKRSLKIE

SEQ ID NO: 4038 - protein, 9 aa, synthetic construct
KKKRKKTIY

SEQ ID NO: 4039 - protein, 9 aa, synthetic construct
KAKHKKQIE

SEQ ID NO: 4040 - protein, 9 aa, synthetic construct
CRKKKRRMW

SEQ ID NO: 4041 - protein, 9 aa, synthetic construct
KKRRKGMGF

SEQ ID NO: 4042 - protein, 9 aa, synthetic construct
KVRKAKVQQ

SEQ ID NO: 4043 - protein, 9 aa, synthetic construct
CKKKKSVCF

SEQ ID NO: 4044 - protein, 9 aa, synthetic construct
MAKRKKRRH

SEQ ID NO: 4045 - protein, 9 aa, synthetic construct
MKHKKKNHV

SEQ ID NO: 4046 - protein, 9 aa, synthetic construct
KSKKRKMTT

SEQ ID NO: 4047 - protein, 9 aa, synthetic construct
KCKKNKHHP

SEQ ID NO: 4048 - protein, 9 aa, synthetic construct
KKKRLRGRG

SEQ ID NO: 4049 - protein, 9 aa, synthetic construct
IVKKGKHKS

SEQ ID NO: 4050 - protein, 9 aa, synthetic construct
SKRKKKIVW

SEQ ID NO: 4051 - protein, 9 aa, synthetic construct
KTKMRKKNA

SEQ ID NO: 4052 - protein, 9 aa, synthetic construct
KKKYSKNTC

SEQ ID NO: 4053 - protein, 9 aa, synthetic construct
AKKKKGMKW

SEQ ID NO: 4054 - protein, 9 aa, synthetic construct
KSKKGKTSP

SEQ ID NO: 4055 - protein, 9 aa, synthetic construct
MIKKIKKCG

SEQ ID NO: 4056 - protein, 9 aa, synthetic construct
RFKRKKMKM

SEQ ID NO: 4057 - protein, 9 aa, synthetic construct
HTRKMKTHF

SEQ ID NO: 4058 - protein, 9 aa, synthetic construct
KTKKSKVAM

SEQ ID NO: 4059 - protein, 9 aa, synthetic construct
GRKKRKKSD

SEQ ID NO: 4060 - protein, 9 aa, synthetic construct
KRKCIKQKF

SEQ ID NO: 4061 - protein, 9 aa, synthetic construct
KRKKGRKAE

SEQ ID NO: 4062 - protein, 9 aa, synthetic construct
QQKKKKATW

SEQ ID NO: 4063 - protein, 9 aa, synthetic construct
KRRKRGYST

SEQ ID NO: 4064 - protein, 9 aa, synthetic construct
KMKRYRWHY

SEQ ID NO: 4065 - protein, 9 aa, synthetic construct
CMKRKKKQP

SEQ ID NO: 4066 - protein, 9 aa, synthetic construct
RKKKKWWST

SEQ ID NO: 4067 - protein, 9 aa, synthetic construct
KKKKYQVFT

SEQ ID NO: 4068 - protein, 9 aa, synthetic construct
KIKMYKKFN

SEQ ID NO: 4069 - protein, 9 aa, synthetic construct
SKKKQKCLV

SEQ ID NO: 4070 - protein, 9 aa, synthetic construct
RKRKKRRIY

SEQ ID NO: 4071 - protein, 9 aa, synthetic construct
IKKRYKHLV

SEQ ID NO: 4072 - protein, 9 aa, synthetic construct
KIKYSKKTG

SEQ ID NO: 4073 - protein, 9 aa, synthetic construct
NAKRYRQHY

SEQ ID NO: 4074 - protein, 9 aa, synthetic construct
KRRRIQRSM

SEQ ID NO: 4075 - protein, 9 aa, synthetic construct
KVKKKGRSD

SEQ ID NO: 4076 - protein, 9 aa, synthetic construct
RTKRNRKCQ

SEQ ID NO: 4077 - protein, 9 aa, synthetic construct
KKRSKSKCS

SEQ ID NO: 4078 - protein, 9 aa, synthetic construct
KCKNAKKVG

SEQ ID NO: 4079 - protein, 9 aa, synthetic construct
HKRRCRHRY

SEQ ID NO: 4080 - protein, 9 aa, synthetic construct
RHKKKKEHC

SEQ ID NO: 4081 - protein, 9 aa, synthetic construct
HKKTKKNSS

SEQ ID NO: 4082 - protein, 9 aa, synthetic construct
KCKKRKFMP

SEQ ID NO: 4083 - protein, 9 aa, synthetic construct
KNKRVKKMG

SEQ ID NO: 4084 - protein, 9 aa, synthetic construct
MKRRKKKWI

SEQ ID NO: 4085 - protein, 9 aa, synthetic construct
NKKNKKVNN

SEQ ID NO: 4086 - protein, 9 aa, synthetic construct
AVKRKRRMQ

SEQ ID NO: 4087 - protein, 9 aa, synthetic construct
KKKRQRGWF

SEQ ID NO: 4088 - protein, 9 aa, synthetic construct
KSKTKSKVC

SEQ ID NO: 4089 - protein, 9 aa, synthetic construct
KVKHVKKQS

SEQ ID NO: 4090 - protein, 9 aa, synthetic construct
NNKKRKKFQ

SEQ ID NO: 4091 - protein, 9 aa, synthetic construct
IKKMKKARM

SEQ ID NO: 4092 - protein, 9 aa, synthetic construct
KVKLKKICH

SEQ ID NO: 4093 - protein, 9 aa, synthetic construct
KFHKKKQSW

SEQ ID NO: 4094 - protein, 9 aa, synthetic construct
KCKKWKIMM

SEQ ID NO: 4095 - protein, 9 aa, synthetic construct
KGKSGKTKM

SEQ ID NO: 4096 - protein, 9 aa, synthetic construct
VRRRKKRWA

SEQ ID NO: 4097 - protein, 9 aa, synthetic construct
KKKAKNYTY

SEQ ID NO: 4098 - protein, 9 aa, synthetic construct
HKKRKPTVY

SEQ ID NO: 4099 - protein, 9 aa, synthetic construct
KVRKRRYCA

SEQ ID NO: 4100 - protein, 9 aa, synthetic construct
KKKRRRNAW

SEQ ID NO: 4101 - protein, 9 aa, synthetic construct
KSKSKKMFR

SEQ ID NO: 4102 - protein, 9 aa, synthetic construct
KKKRKVYGM

SEQ ID NO: 4103 - protein, 9 aa, synthetic construct
SRRRKKNKH

SEQ ID NO: 4104 - protein, 9 aa, synthetic construct
RKRKKRYHM

SEQ ID NO: 4105 - protein, 9 aa, synthetic construct
KPKRKSCKH

SEQ ID NO: 4106 - protein, 9 aa, synthetic construct
KTKRRKSMC

SEQ ID NO: 4107 - protein, 9 aa, synthetic construct
AKKKFKYNN

SEQ ID NO: 4108 - protein, 9 aa, synthetic construct
RRKRIKSSQ

SEQ ID NO: 4109 - protein, 9 aa, synthetic construct
KKKGRRKNR

SEQ ID NO: 4110 - protein, 9 aa, synthetic construct
KAKGFKKMD

SEQ ID NO: 4111 - protein, 9 aa, synthetic construct
RRKKAKHVH

SEQ ID NO: 4112 - protein, 9 aa, synthetic construct
YKKRKKCGM

SEQ ID NO: 4113 - protein, 9 aa, synthetic construct
KARRMKRQK

SEQ ID NO: 4114 - protein, 9 aa, synthetic construct
SAKKKKWDS

SEQ ID NO: 4115 - protein, 9 aa, synthetic construct
VHKKKKSCW

SEQ ID NO: 4116 - protein, 9 aa, synthetic construct
QVKVKKKCL

SEQ ID NO: 4117 - protein, 9 aa, synthetic construct
KAKRFRWRS

SEQ ID NO: 4118 - protein, 9 aa, synthetic construct
KKKIYKLHN

SEQ ID NO: 4119 - protein, 9 aa, synthetic construct
KKHMKKSQV

SEQ ID NO: 4120 - protein, 9 aa, synthetic construct
RRRRKKFTP

SEQ ID NO: 4121 - protein, 9 aa, synthetic construct
KKKWIKGWG

SEQ ID NO: 4122 - protein, 9 aa, synthetic construct
QAKKKKVHA

SEQ ID NO: 4123 - protein, 9 aa, synthetic construct
QKKKMRKFS

SEQ ID NO: 4124 - protein, 9 aa, synthetic construct
KKRCKKCSS

SEQ ID NO: 4125 - protein, 9 aa, synthetic construct
KRHRAKKKH

SEQ ID NO: 4126 - protein, 9 aa, synthetic construct
MAKRYRWWS

SEQ ID NO: 4127 - protein, 9 aa, synthetic construct
KKKYFKKVY

SEQ ID NO: 4128 - protein, 9 aa, synthetic construct
KKKKKPRSG

SEQ ID NO: 4129 - protein, 9 aa, synthetic construct
RQKKRKAGS

SEQ ID NO: 4130 - protein, 9 aa, synthetic construct
KRKRRIGRT

SEQ ID NO: 4131 - protein, 9 aa, synthetic construct
KSKKKIRAS

SEQ ID NO: 4132 - protein, 9 aa, synthetic construct
KRRKMRQVS

SEQ ID NO: 4133 - protein, 9 aa, synthetic construct
LVKKSKKNG

SEQ ID NO: 4134 - protein, 9 aa, synthetic construct
RKKKKMGWN

SEQ ID NO: 4135 - protein, 9 aa, synthetic construct
KAKVHKKRN

SEQ ID NO: 4136 - protein, 9 aa, synthetic construct
KKRLCKWKV

SEQ ID NO: 4137 - protein, 9 aa, synthetic construct
KSRKMKFMC

SEQ ID NO: 4138 - protein, 9 aa, synthetic construct
GGRRKKRYY

SEQ ID NO: 4139 - protein, 9 aa, synthetic construct
LKKKTGRKP

SEQ ID NO: 4140 - protein, 9 aa, synthetic construct
KAKRCKRWY

SEQ ID NO: 4141 - protein, 9 aa, synthetic construct
LYKKRKKCI

SEQ ID NO: 4142 - protein, 9 aa, synthetic construct
KAKAFKSSQ

SEQ ID NO: 4143 - protein, 9 aa, synthetic construct
SKRKNKSCT

SEQ ID NO: 4144 - protein, 9 aa, synthetic construct
KQKKKGDAR

SEQ ID NO: 4145 - protein, 9 aa, synthetic construct
ILKRKKKSL

SEQ ID NO: 4146 - protein, 9 aa, synthetic construct
KVKKKQVNG

SEQ ID NO: 4147 - protein, 9 aa, synthetic construct
HRRRTKRFQ

SEQ ID NO: 4148 - protein, 9 aa, synthetic construct
KVKKKTVGP

SEQ ID NO: 4149 - protein, 9 aa, synthetic construct
KALKKKGWG

SEQ ID NO: 4150 - protein, 9 aa, synthetic construct
SKKRKKQKH

SEQ ID NO: 4151 - protein, 9 aa, synthetic construct
KVKPKKHLA

SEQ ID NO: 4152 - protein, 9 aa, synthetic construct
KKKSIKVVP

SEQ ID NO: 4153 - protein, 9 aa, synthetic construct
KKRRAKNCP

SEQ ID NO: 4154 - protein, 9 aa, synthetic construct
KTRKGKKHG

SEQ ID NO: 4155 - protein, 9 aa, synthetic construct
ISRKKKQAG

SEQ ID NO: 4156 - protein, 9 aa, synthetic construct
KAKKKRNQA

SEQ ID NO: 4157 - protein, 9 aa, synthetic construct
VKKRKRVWT

SEQ ID NO: 4158 - protein, 9 aa, synthetic construct
QKKRQRYPS

SEQ ID NO: 4159 - protein, 9 aa, synthetic construct
KKKGVKNRS

SEQ ID NO: 4160 - protein, 9 aa, synthetic construct
KRRKIKKGG

SEQ ID NO: 4161 - protein, 9 aa, synthetic construct
KRKRPRQSC

SEQ ID NO: 4162 - protein, 9 aa, synthetic construct
RKRKRIGGT

SEQ ID NO: 4163 - protein, 9 aa, synthetic construct
KKKRSRRSC

SEQ ID NO: 4164 - protein, 9 aa, synthetic construct
RKKKRCKSS

SEQ ID NO: 4165 - protein, 9 aa, synthetic construct
KTKKPKQHP

SEQ ID NO: 4166 - protein, 9 aa, synthetic construct
HKKKKCNWC

SEQ ID NO: 4167 - protein, 9 aa, synthetic construct
KQRKIKRYP

SEQ ID NO: 4168 - protein, 9 aa, synthetic construct
KTKKKQRAN

SEQ ID NO: 4169 - protein, 9 aa, synthetic construct
KSKNKTTKC

SEQ ID NO: 4170 - protein, 9 aa, synthetic construct
RFKRKKFIS

SEQ ID NO: 4171 - protein, 9 aa, synthetic construct
KKKMKSRHP

SEQ ID NO: 4172 - protein, 9 aa, synthetic construct
KCKSKRHHK

SEQ ID NO: 4173 - protein, 9 aa, synthetic construct
KRKTKKHPQ

SEQ ID NO: 4174 - protein, 9 aa, synthetic construct
KSRKTKYCK

SEQ ID NO: 4175 - protein, 9 aa, synthetic construct
RTKRSRSNY

SEQ ID NO: 4176 - protein, 9 aa, synthetic construct
KRARKKAKC

SEQ ID NO: 4177 - protein, 9 aa, synthetic construct
AAKRKKKCC

SEQ ID NO: 4178 - protein, 9 aa, synthetic construct
KKKRYRRYW

SEQ ID NO: 4179 - protein, 9 aa, synthetic construct
TKKRYKRMY

SEQ ID NO: 4180 - protein, 9 aa, synthetic construct
KKRRIRNYG

SEQ ID NO: 4181 - protein, 9 aa, synthetic construct
KRKKNLKAN

SEQ ID NO: 4182 - protein, 9 aa, synthetic construct
VLKHKKKSC

SEQ ID NO: 4183 - protein, 9 aa, synthetic construct
KTCKKKWMG

SEQ ID NO: 4184 - protein, 9 aa, synthetic construct
KRRKLRRGG

SEQ ID NO: 4185 - protein, 9 aa, synthetic construct
KNKKKHWRP

SEQ ID NO: 4186 - protein, 9 aa, synthetic construct
KSRKTKTGW

SEQ ID NO: 4187 - protein, 9 aa, synthetic construct
KKSRKRKQF

SEQ ID NO: 4188 - protein, 9 aa, synthetic construct
HKKGFKKWY

SEQ ID NO: 4189 - protein, 9 aa, synthetic construct
KAKRKKWLH

SEQ ID NO: 4190 - protein, 9 aa, synthetic construct
KKKRFVMRG

SEQ ID NO: 4191 - protein, 9 aa, synthetic construct
KTKKQRKAV

SEQ ID NO: 4192 - protein, 9 aa, synthetic construct
KGKKSKQGG

SEQ ID NO: 4193 - protein, 9 aa, synthetic construct
RKKQQKNKA

SEQ ID NO: 4194 - protein, 9 aa, synthetic construct
KFRKKHTLP

SEQ ID NO: 4195 - protein, 9 aa, synthetic construct
RKKRYRWCQ

SEQ ID NO: 4196 - protein, 9 aa, synthetic construct
HKKKKHFYA

SEQ ID NO: 4197 - protein, 9 aa, synthetic construct
VKKRNRRTM

SEQ ID NO: 4198 - protein, 9 aa, synthetic construct
RKKKMKGAG

SEQ ID NO: 4199 - protein, 9 aa, synthetic construct
KKKSMARKW

SEQ ID NO: 4200 - protein, 9 aa, synthetic construct
KTKKTKAWG

SEQ ID NO: 4201 - protein, 9 aa, synthetic construct
KTRRKKHTD

SEQ ID NO: 4202 - protein, 9 aa, synthetic construct
LKRKKPKCQ

SEQ ID NO: 4203 - protein, 9 aa, synthetic construct
QVKGKKAKP

SEQ ID NO: 4204 - protein, 9 aa, synthetic construct
IKKRRRFGP

SEQ ID NO: 4205 - protein, 9 aa, synthetic construct
NGKHKKKCF

SEQ ID NO: 4206 - protein, 9 aa, synthetic construct
KMKACKKAG

SEQ ID NO: 4207 - protein, 9 aa, synthetic construct
KKKRNKIYS

SEQ ID NO: 4208 - protein, 9 aa, synthetic construct
KKKKGNYLT

SEQ ID NO: 4209 - protein, 9 aa, synthetic construct
KKKQYKSWV

SEQ ID NO: 4210 - protein, 9 aa, synthetic construct
KFKKMKRKM

SEQ ID NO: 4211 - protein, 9 aa, synthetic construct
KQKRSKAYC

SEQ ID NO: 4212 - protein, 9 aa, synthetic construct
KGKKRGRQM

SEQ ID NO: 4213 - protein, 9 aa, synthetic construct
KKKKHWFVA

SEQ ID NO: 4214 - protein, 9 aa, synthetic construct
KARWKKRHG

SEQ ID NO: 4215 - protein, 9 aa, synthetic construct
RKKRKRRNN

SEQ ID NO: 4216 - protein, 9 aa, synthetic construct
KKCKKKVPA

SEQ ID NO: 4217 - protein, 9 aa, synthetic construct
VTKKKKVRT

SEQ ID NO: 4218 - protein, 9 aa, synthetic construct
SVRKKKKAA

SEQ ID NO: 4219 - protein, 9 aa, synthetic construct
AKKHMKKVG

SEQ ID NO: 4220 - protein, 9 aa, synthetic construct
TKKKKRYHN

SEQ ID NO: 4221 - protein, 9 aa, synthetic construct
KWRKFKCYH

SEQ ID NO: 4222 - protein, 9 aa, synthetic construct
HKRKRHMNP

SEQ ID NO: 4223 - protein, 9 aa, synthetic construct
RKKTKKAFT

SEQ ID NO: 4224 - protein, 9 aa, synthetic construct
IQKKKKCWL

SEQ ID NO: 4225 - protein, 9 aa, synthetic construct
KYRKYKTSS

SEQ ID NO: 4226 - protein, 9 aa, synthetic construct
KSKRYKTCC

SEQ ID NO: 4227 - protein, 9 aa, synthetic construct
VKKKSKVTS

SEQ ID NO: 4228 - protein, 9 aa, synthetic construct
KSKRKGHNK

SEQ ID NO: 4229 - protein, 9 aa, synthetic construct
RKKMKRQKE

SEQ ID NO: 4230 - protein, 9 aa, synthetic construct
KNKRKAKWP

SEQ ID NO: 4231 - protein, 9 aa, synthetic construct
KRKKRGSWG

SEQ ID NO: 4232 - protein, 9 aa, synthetic construct
KARRVRRYY

SEQ ID NO: 4233 - protein, 9 aa, synthetic construct
QKKKVKKCW

SEQ ID NO: 4234 - protein, 9 aa, synthetic construct
VRKRQRQCT

SEQ ID NO: 4235 - protein, 9 aa, synthetic construct
RKRKWKCHC

SEQ ID NO: 4236 - protein, 9 aa, synthetic construct
KVKKKAVVY

SEQ ID NO: 4237 - protein, 9 aa, synthetic construct
KVKKVKISP

SEQ ID NO: 4238 - protein, 9 aa, synthetic construct
KKKKHQPVA

SEQ ID NO: 4239 - protein, 9 aa, synthetic construct
KRRRKTGSQ

SEQ ID NO: 4240 - protein, 9 aa, synthetic construct
QNKKKKAYI

SEQ ID NO: 4241 - protein, 9 aa, synthetic construct
AKKKCKKWT

SEQ ID NO: 4242 - protein, 9 aa, synthetic construct
TKKRRKSPS

SEQ ID NO: 4243 - protein, 9 aa, synthetic construct
KCKRRKKAG

SEQ ID NO: 4244 - protein, 9 aa, synthetic construct
KNKRRKKLY

SEQ ID NO: 4245 - protein, 9 aa, synthetic construct
KVKASKRKC

SEQ ID NO: 4246 - protein, 9 aa, synthetic construct
KKKRFSQVF

SEQ ID NO: 4247 - protein, 9 aa, synthetic construct
KGKWKKFIG

SEQ ID NO: 4248 - protein, 9 aa, synthetic construct
HIRKKKYGN

SEQ ID NO: 4249 - protein, 9 aa, synthetic construct
KLKWKKMWC

SEQ ID NO: 4250 - protein, 9 aa, synthetic construct
KRRKNRYWA

SEQ ID NO: 4251 - protein, 9 aa, synthetic construct
HKKKIKRCD

SEQ ID NO: 4252 - protein, 9 aa, synthetic construct
KCKKKSTYS

SEQ ID NO: 4253 - protein, 9 aa, synthetic construct
KKFKVKHIC

SEQ ID NO: 4254 - protein, 9 aa, synthetic construct
QKKVMKKCG

SEQ ID NO: 4255 - protein, 9 aa, synthetic construct
HKRKICGHH

SEQ ID NO: 4256 - protein, 9 aa, synthetic construct
KVKKKRCRK

SEQ ID NO: 4257 - protein, 9 aa, synthetic construct
KTRKKNHGT

SEQ ID NO: 4258 - protein, 9 aa, synthetic construct
KKQKKRSQN

SEQ ID NO: 4259 - protein, 9 aa, synthetic construct
KKARRKRYH

SEQ ID NO: 4260 - protein, 9 aa, synthetic construct
KSKKHKHDH

SEQ ID NO: 4261 - protein, 9 aa, synthetic construct
KSKDKKQWQ

SEQ ID NO: 4262 - protein, 9 aa, synthetic construct
AKKRKRVAW

SEQ ID NO: 4263 - protein, 9 aa, synthetic construct
SPKKKKWRT

SEQ ID NO: 4264 - protein, 9 aa, synthetic construct
KFKKTKWKF

SEQ ID NO: 4265 - protein, 9 aa, synthetic construct
KRKVKKLMF

SEQ ID NO: 4266 - protein, 9 aa, synthetic construct
KFRKVKTAT

SEQ ID NO: 4267 - protein, 9 aa, synthetic construct
YKKMKKCAY

SEQ ID NO: 4268 - protein, 9 aa, synthetic construct
RKKKDRRKC

SEQ ID NO: 4269 - protein, 9 aa, synthetic construct
HKRRRKTPP

SEQ ID NO: 4270 - protein, 9 aa, synthetic construct
KAKKKNFVI

SEQ ID NO: 4271 - protein, 9 aa, synthetic construct
GKKHTKGKQ

SEQ ID NO: 4272 - protein, 9 aa, synthetic construct
KMKSKKMQQ

SEQ ID NO: 4273 - protein, 9 aa, synthetic construct
RAKRYKKTA

SEQ ID NO: 4274 - protein, 9 aa, synthetic construct
NCKRKKGNK

SEQ ID NO: 4275 - protein, 9 aa, synthetic construct
KKKHMKIGN

SEQ ID NO: 4276 - protein, 9 aa, synthetic construct
KYKFKKWST

SEQ ID NO: 4277 - protein, 9 aa, synthetic construct
KSKRYRMMV

SEQ ID NO: 4278 - protein, 9 aa, synthetic construct
KKKKAKMDG

SEQ ID NO: 4279 - protein, 9 aa, synthetic construct
TNKKKKKAV

SEQ ID NO: 4280 - protein, 9 aa, synthetic construct
KLKKFKRDW

SEQ ID NO: 4281 - protein, 9 aa, synthetic construct
KQKRRRRCM

SEQ ID NO: 4282 - protein, 9 aa, synthetic construct
KKKWLKNIY

SEQ ID NO: 4283 - protein, 9 aa, synthetic construct
KVKMKKIWA

SEQ ID NO: 4284 - protein, 9 aa, synthetic construct
KKKSSKSFC

SEQ ID NO: 4285 - protein, 9 aa, synthetic construct
KKRKHINKA

SEQ ID NO: 4286 - protein, 9 aa, synthetic construct
KRKRKRRCH

SEQ ID NO: 4287 - protein, 9 aa, synthetic construct
YKKKMKWML

SEQ ID NO: 4288 - protein, 9 aa, synthetic construct
AKKGKKQMT

SEQ ID NO: 4289 - protein, 9 aa, synthetic construct
CKKFQKKFA

SEQ ID NO: 4290 - protein, 9 aa, synthetic construct
NKRRIKHRQ

SEQ ID NO: 4291 - protein, 9 aa, synthetic construct
IKKRRKTQN

SEQ ID NO: 4292 - protein, 9 aa, synthetic construct
RKKQKKRTS

SEQ ID NO: 4293 - protein, 9 aa, synthetic construct
RSKRRKACG

SEQ ID NO: 4294 - protein, 9 aa, synthetic construct
YGRKKKQCK

SEQ ID NO: 4295 - protein, 9 aa, synthetic construct
RTKKKKVCS

SEQ ID NO: 4296 - protein, 9 aa, synthetic construct
KAKTKGYKN

SEQ ID NO: 4297 - protein, 9 aa, synthetic construct
KSKKKRNQQ

SEQ ID NO: 4298 - protein, 9 aa, synthetic construct
KLKRTRRSW

SEQ ID NO: 4299 - protein, 9 aa, synthetic construct
RTRKVKHKC

SEQ ID NO: 4300 - protein, 9 aa, synthetic construct
KVKRYRNHW

SEQ ID NO: 4301 - protein, 9 aa, synthetic construct
QRRRNKRQQ

SEQ ID NO: 4302 - protein, 9 aa, synthetic construct
KKRRYHSWA

SEQ ID NO: 4303 - protein, 9 aa, synthetic construct
KKKSKKNSA

SEQ ID NO: 4304 - protein, 9 aa, synthetic construct
KVKWKKDQG

SEQ ID NO: 4305 - protein, 9 aa, synthetic construct
VKKGMKKQY

SEQ ID NO: 4306 - protein, 9 aa, synthetic construct
KVRRKRRPS

SEQ ID NO: 4307 - protein, 9 aa, synthetic construct
YVRKKKFGG

SEQ ID NO: 4308 - protein, 9 aa, synthetic construct
KVKKKRIQF

SEQ ID NO: 4309 - protein, 9 aa, synthetic construct
MKGKKKCAG

SEQ ID NO: 4310 - protein, 9 aa, synthetic construct
KKKWVKTFW

SEQ ID NO: 4311 - protein, 9 aa, synthetic construct
NKKHRKKGH

SEQ ID NO: 4312 - protein, 9 aa, synthetic construct
KKKRHQVVK

SEQ ID NO: 4313 - protein, 9 aa, synthetic construct
MWKRKKVKC

SEQ ID NO: 4314 - protein, 9 aa, synthetic construct
KGRRKRSAM

SEQ ID NO: 4315 - protein, 9 aa, synthetic construct
KCRKKQAKN

SEQ ID NO: 4316 - protein, 9 aa, synthetic construct
KKRKHARVH

SEQ ID NO: 4317 - protein, 9 aa, synthetic construct
KLKVKKVGS

SEQ ID NO: 4318 - protein, 9 aa, synthetic construct
KCKRQKRCA

SEQ ID NO: 4319 - protein, 9 aa, synthetic construct
HIKFKKKQC

SEQ ID NO: 4320 - protein, 9 aa, synthetic construct
AKKNKKWFT

SEQ ID NO: 4321 - protein, 9 aa, synthetic construct
KQKIVKKWM

SEQ ID NO: 4322 - protein, 9 aa, synthetic construct
KTKRIRHHQ

SEQ ID NO: 4323 - protein, 9 aa, synthetic construct
KIRKKRRRL

SEQ ID NO: 4324 - protein, 9 aa, synthetic construct
GFKKKKKQQ

SEQ ID NO: 4325 - protein, 9 aa, synthetic construct
RKKRGKCYG

SEQ ID NO: 4326 - protein, 9 aa, synthetic construct
KVKKRKTNG

SEQ ID NO: 4327 - protein, 9 aa, synthetic construct
KKKRRSNLS

SEQ ID NO: 4328 - protein, 9 aa, synthetic construct
KRKSGKNKS

SEQ ID NO: 4329 - protein, 9 aa, synthetic construct
KKRKTHATK

SEQ ID NO: 4330 - protein, 9 aa, synthetic construct
KCKKRGRTK

SEQ ID NO: 4331 - protein, 9 aa, synthetic construct
QKKCKKRAI

SEQ ID NO: 4332 - protein, 9 aa, synthetic construct
QKKFRKKQQ

SEQ ID NO: 4333 - protein, 9 aa, synthetic construct
KQKRIKKLG

SEQ ID NO: 4334 - protein, 9 aa, synthetic construct
KKKLKGWHV

SEQ ID NO: 4335 - protein, 9 aa, synthetic construct
KKKKMYFSY

SEQ ID NO: 4336 - protein, 9 aa, synthetic construct
KTKKVKYWN

SEQ ID NO: 4337 - protein, 9 aa, synthetic construct
RKKFLKRKG

SEQ ID NO: 4338 - protein, 9 aa, synthetic construct
IKKRKKTQW

SEQ ID NO: 4339 - protein, 9 aa, synthetic construct
KFKPKKAYA

SEQ ID NO: 4340 - protein, 9 aa, synthetic construct
KKRKRSAKS

SEQ ID NO: 4341 - protein, 9 aa, synthetic construct
LAKPKKKAN

SEQ ID NO: 4342 - protein, 9 aa, synthetic construct
KVKRKSNKT

SEQ ID NO: 4343 - protein, 9 aa, synthetic construct
KKKCKLAMF

SEQ ID NO: 4344 - protein, 9 aa, synthetic construct
KKKANKHMD

SEQ ID NO: 4345 - protein, 9 aa, synthetic construct
KTRKRRLYA

SEQ ID NO: 4346 - protein, 9 aa, synthetic construct
RKRRHKGRP

SEQ ID NO: 4347 - protein, 9 aa, synthetic construct
RKKKKQASY

SEQ ID NO: 4348 - protein, 9 aa, synthetic construct
KKKKTRHKS

SEQ ID NO: 4349 - protein, 9 aa, synthetic construct
HKKIKKYVS

SEQ ID NO: 4350 - protein, 9 aa, synthetic construct
KKKLGKCRW

SEQ ID NO: 4351 - protein, 9 aa, synthetic construct
QKRKIRRMA

SEQ ID NO: 4352 - protein, 9 aa, synthetic construct
RHKKKRHCQ

SEQ ID NO: 4353 - protein, 9 aa, synthetic construct
KKKKGKGIA

SEQ ID NO: 4354 - protein, 9 aa, synthetic construct
KKKKYWMIH

SEQ ID NO: 4355 - protein, 9 aa, synthetic construct
KKKRPKATT

SEQ ID NO: 4356 - protein, 9 aa, synthetic construct
KGKKKSVYP

SEQ ID NO: 4357 - protein, 9 aa, synthetic construct
KSKKKRRFD

SEQ ID NO: 4358 - protein, 9 aa, synthetic construct
MIKKVKTKG

SEQ ID NO: 4359 - protein, 9 aa, synthetic construct
KSKKKAQMH

SEQ ID NO: 4360 - protein, 9 aa, synthetic construct
CKKYKKYNY

SEQ ID NO: 4361 - protein, 9 aa, synthetic construct
KKRRTRHSF

SEQ ID NO: 4362 - protein, 9 aa, synthetic construct
KHKAMKFKN

SEQ ID NO: 4363 - protein, 9 aa, synthetic construct
HKRKKKLGV

SEQ ID NO: 4364 - protein, 9 aa, synthetic construct
KVRRKKNAP

SEQ ID NO: 4365 - protein, 9 aa, synthetic construct
KKKITKRGA

SEQ ID NO: 4366 - protein, 9 aa, synthetic construct
MKKKKKVCC

SEQ ID NO: 4367 - protein, 9 aa, synthetic construct
KVRKRKKCA

SEQ ID NO: 4368 - protein, 9 aa, synthetic construct
KFKRKNCKQ

SEQ ID NO: 4369 - protein, 9 aa, synthetic construct
SVKKKKNVS

SEQ ID NO: 4370 - protein, 9 aa, synthetic construct
GPKKKKWSS

SEQ ID NO: 4371 - protein, 9 aa, synthetic construct
RKKRHGKGC

SEQ ID NO: 4372 - protein, 9 aa, synthetic construct
KVKMCKQKW

SEQ ID NO: 4373 - protein, 9 aa, synthetic construct
HKRKGHWVQ

SEQ ID NO: 4374 - protein, 9 aa, synthetic construct
KFKKKINFW

SEQ ID NO: 4375 - protein, 9 aa, synthetic construct
RKKRGRKES

SEQ ID NO: 4376 - protein, 9 aa, synthetic construct
TKKRKPKGS

SEQ ID NO: 4377 - protein, 9 aa, synthetic construct
HKKRNRFCT

SEQ ID NO: 4378 - protein, 9 aa, synthetic construct
KRKCKAKGN

SEQ ID NO: 4379 - protein, 9 aa, synthetic construct
KTRKSKKDR

SEQ ID NO: 4380 - protein, 9 aa, synthetic construct
KIKRKRKHM

SEQ ID NO: 4381 - protein, 9 aa, synthetic construct
TKRRHKRQV

SEQ ID NO: 4382 - protein, 9 aa, synthetic construct
KKKTCKLGH

SEQ ID NO: 4383 - protein, 9 aa, synthetic construct
KKKKAQRHT

SEQ ID NO: 4384 - protein, 9 aa, synthetic construct
KKKCKRKYA

SEQ ID NO: 4385 - protein, 9 aa, synthetic construct
HKKNIKKHW

SEQ ID NO: 4386 - protein, 9 aa, synthetic construct
EKKRKKWYS

SEQ ID NO: 4387 - protein, 9 aa, synthetic construct
KKKHCKLHW

SEQ ID NO: 4388 - protein, 9 aa, synthetic construct
KLKSKKRGR

SEQ ID NO: 4389 - protein, 9 aa, synthetic construct
STKRRRRAS

SEQ ID NO: 4390 - protein, 9 aa, synthetic construct
KRKKSMMKT

SEQ ID NO: 4391 - protein, 9 aa, synthetic construct
AKKKIKKVG

SEQ ID NO: 4392 - protein, 9 aa, synthetic construct
KRKRWKKLF

SEQ ID NO: 4393 - protein, 9 aa, synthetic construct
KVKKSKAHM

SEQ ID NO: 4394 - protein, 9 aa, synthetic construct
KKRRWRHHH

SEQ ID NO: 4395 - protein, 9 aa, synthetic construct
RSRKVKRHY

SEQ ID NO: 4396 - protein, 9 aa, synthetic construct
KKKKTLHTN

SEQ ID NO: 4397 - protein, 9 aa, synthetic construct
CKKKRKQHC

SEQ ID NO: 4398 - protein, 9 aa, synthetic construct
TKKTKKQQP

SEQ ID NO: 4399 - protein, 9 aa, synthetic construct
KKKRLKHSD

SEQ ID NO: 4400 - protein, 9 aa, synthetic construct
MARKKKSRT

SEQ ID NO: 4401 - protein, 9 aa, synthetic construct
NKKPRKVKW

SEQ ID NO: 4402 - protein, 9 aa, synthetic construct
VKKRKRNHV

SEQ ID NO: 4403 - protein, 9 aa, synthetic construct
KVKKMKWKR

SEQ ID NO: 4404 - protein, 9 aa, synthetic construct
KKRKNKEFI

SEQ ID NO: 4405 - protein, 9 aa, synthetic construct
KKKGKRHRG

SEQ ID NO: 4406 - protein, 9 aa, synthetic construct
LAKHKKHKH

SEQ ID NO: 4407 - protein, 9 aa, synthetic construct
KQKKMKRQD

SEQ ID NO: 4408 - protein, 9 aa, synthetic construct
KAKWKKWSW

SEQ ID NO: 4409 - protein, 9 aa, synthetic construct
LKRKKRKDC

SEQ ID NO: 4410 - protein, 9 aa, synthetic construct
KKRKWHYYG

SEQ ID NO: 4411 - protein, 9 aa, synthetic construct
KAKKKHSRV

SEQ ID NO: 4412 - protein, 9 aa, synthetic construct
KQKKKRRTT

SEQ ID NO: 4413 - protein, 9 aa, synthetic construct
KKKCKNSGT

SEQ ID NO: 4414 - protein, 9 aa, synthetic construct
QKRKRKLSE

SEQ ID NO: 4415 - protein, 9 aa, synthetic construct
CKKLKKTGY

SEQ ID NO: 4416 - protein, 9 aa, synthetic construct
RKKKPKMQM

SEQ ID NO: 4417 - protein, 9 aa, synthetic construct
RRRRSKSKA

SEQ ID NO: 4418 - protein, 9 aa, synthetic construct
HKKSWKKYP

SEQ ID NO: 4419 - protein, 9 aa, synthetic construct
KKKWKVVNW

SEQ ID NO: 4420 - protein, 9 aa, synthetic construct
KKKVQKMHP

SEQ ID NO: 4421 - protein, 9 aa, synthetic construct
KKRKKGSWA

SEQ ID NO: 4422 - protein, 9 aa, synthetic construct
KIRRYKRQA

SEQ ID NO: 4423 - protein, 9 aa, synthetic construct
KKFKKKSAN

SEQ ID NO: 4424 - protein, 9 aa, synthetic construct
SKRKKRKWG

SEQ ID NO: 4425 - protein, 9 aa, synthetic construct
MSRKKKRST

SEQ ID NO: 4426 - protein, 9 aa, synthetic construct
KKRRHGRWY

SEQ ID NO: 4427 - protein, 9 aa, synthetic construct
KKKKSSTGP

SEQ ID NO: 4428 - protein, 9 aa, synthetic construct
KVRKTKIGE

SEQ ID NO: 4429 - protein, 9 aa, synthetic construct
KKRRTCRHQ

SEQ ID NO: 4430 - protein, 9 aa, synthetic construct
KKRKGIRGT

SEQ ID NO: 4431 - protein, 9 aa, synthetic construct
HKRKKHNQM

SEQ ID NO: 4432 - protein, 9 aa, synthetic construct
RKKRHKGNQ

SEQ ID NO: 4433 - protein, 9 aa, synthetic construct
LCKKKKRTC

SEQ ID NO: 4434 - protein, 9 aa, synthetic construct
LKKPKKTCN

SEQ ID NO: 4435 - protein, 9 aa, synthetic construct
KIKHKKWLV

SEQ ID NO: 4436 - protein, 9 aa, synthetic construct
KKKKKIQMQ

SEQ ID NO: 4437 - protein, 9 aa, synthetic construct
KVKRKQQLC

SEQ ID NO: 4438 - protein, 9 aa, synthetic construct
RCRKRKSIC

SEQ ID NO: 4439 - protein, 9 aa, synthetic construct
SKKRRRRMS

SEQ ID NO: 4440 - protein, 9 aa, synthetic construct
ICKKKRLKG

SEQ ID NO: 4441 - protein, 9 aa, synthetic construct
KLRKFKGKY

SEQ ID NO: 4442 - protein, 9 aa, synthetic construct
KLKRKKNVQ

SEQ ID NO: 4443 - protein, 9 aa, synthetic construct
RMKKKRQIM

SEQ ID NO: 4444 - protein, 9 aa, synthetic construct
KKRRQKVKH

SEQ ID NO: 4445 - protein, 9 aa, synthetic construct
KKKSKKMFE

SEQ ID NO: 4446 - protein, 9 aa, synthetic construct
HRKRVRVRF

SEQ ID NO: 4447 - protein, 9 aa, synthetic construct
KMKKKRCPA

SEQ ID NO: 4448 - protein, 9 aa, synthetic construct
SARKKKWCC

SEQ ID NO: 4449 - protein, 9 aa, synthetic construct
HKKRKQTGT

SEQ ID NO: 4450 - protein, 9 aa, synthetic construct
KKKACKKSA

SEQ ID NO: 4451 - protein, 9 aa, synthetic construct
KIKKTRKNH

SEQ ID NO: 4452 - protein, 9 aa, synthetic construct
VKKKLKTGA

SEQ ID NO: 4453 - protein, 9 aa, synthetic construct
KFKARKHKT

SEQ ID NO: 4454 - protein, 9 aa, synthetic construct
KHKSHKKQL

SEQ ID NO: 4455 - protein, 9 aa, synthetic construct
RKNKKKHNA

SEQ ID NO: 4456 - protein, 9 aa, synthetic construct
CRKKKKIKC

SEQ ID NO: 4457 - protein, 9 aa, synthetic construct
HHKRQRAHH

SEQ ID NO: 4458 - protein, 9 aa, synthetic construct
CVRKKKQVG

SEQ ID NO: 4459 - protein, 9 aa, synthetic construct
SFKWKKKQY

SEQ ID NO: 4460 - protein, 9 aa, synthetic construct
HGKQKKKCC

SEQ ID NO: 4461 - protein, 9 aa, synthetic construct
KARRMKNWS

SEQ ID NO: 4462 - protein, 9 aa, synthetic construct
KKKRFGRQK

SEQ ID NO: 4463 - protein, 9 aa, synthetic construct
KNKKMKKAA

SEQ ID NO: 4464 - protein, 9 aa, synthetic construct
KTKVKKVAH

SEQ ID NO: 4465 - protein, 9 aa, synthetic construct
KKKNYKSSY

SEQ ID NO: 4466 - protein, 9 aa, synthetic construct
QKKGRKKNL

SEQ ID NO: 4467 - protein, 9 aa, synthetic construct
TRRKKRRPC

SEQ ID NO: 4468 - protein, 9 aa, synthetic construct
KGKVSKKQS

SEQ ID NO: 4469 - protein, 9 aa, synthetic construct
RNRKKKWCC

SEQ ID NO: 4470 - protein, 9 aa, synthetic construct
KKKKRKNHR

SEQ ID NO: 4471 - protein, 9 aa, synthetic construct
LHKKKKGNW

SEQ ID NO: 4472 - protein, 9 aa, synthetic construct
HTKKKKFAP

SEQ ID NO: 4473 - protein, 9 aa, synthetic construct
NKKKFKTVQ

SEQ ID NO: 4474 - protein, 9 aa, synthetic construct
KFRKKRWVP

SEQ ID NO: 4475 - protein, 9 aa, synthetic construct
KKKKQNHGC

SEQ ID NO: 4476 - protein, 9 aa, synthetic construct
VNKKKKHAA

SEQ ID NO: 4477 - protein, 9 aa, synthetic construct
SMKKKRKAS

SEQ ID NO: 4478 - protein, 9 aa, synthetic construct
SKKKQKARP

SEQ ID NO: 4479 - protein, 9 aa, synthetic construct
TGKKKKHYW

SEQ ID NO: 4480 - protein, 9 aa, synthetic construct
YCKKWKIKN

SEQ ID NO: 4481 - protein, 9 aa, synthetic construct
TKRKKKQFH

SEQ ID NO: 4482 - protein, 9 aa, synthetic construct
KKQKKHRMP

SEQ ID NO: 4483 - protein, 9 aa, synthetic construct
KTRNKKPKC

SEQ ID NO: 4484 - protein, 9 aa, synthetic construct
HAKGKKKCM

SEQ ID NO: 4485 - protein, 9 aa, synthetic construct
KKKKCPHAQ

SEQ ID NO: 4486 - protein, 9 aa, synthetic construct
KKKRVKDKQ

SEQ ID NO: 4487 - protein, 9 aa, synthetic construct
KKKTQRHHN

SEQ ID NO: 4488 - protein, 9 aa, synthetic construct
KKKWWKKSQ

SEQ ID NO: 4489 - protein, 9 aa, synthetic construct
KVKRKGHCQ

SEQ ID NO: 4490 - protein, 9 aa, synthetic construct
KVKRSKHCQ

SEQ ID NO: 4491 - protein, 9 aa, synthetic construct
KIRKKKDMQ

SEQ ID NO: 4492 - protein, 9 aa, synthetic construct
KKKIRKNFY

SEQ ID NO: 4493 - protein, 9 aa, synthetic construct
SKRKYKKTG

SEQ ID NO: 4494 - protein, 9 aa, synthetic construct
KKKPKHVCA

SEQ ID NO: 4495 - protein, 9 aa, synthetic construct
KRRKHIRRH

SEQ ID NO: 4496 - protein, 9 aa, synthetic construct
CRKKTKQKV

SEQ ID NO: 4497 - protein, 9 aa, synthetic construct
RARKKKCFF

SEQ ID NO: 4498 - protein, 9 aa, synthetic construct
IKKCKKRVM

SEQ ID NO: 4499 - protein, 9 aa, synthetic construct
HKKRNRKSK

SEQ ID NO: 4500 - protein, 9 aa, synthetic construct
KKRFKKAFG

SEQ ID NO: 4501 - protein, 9 aa, synthetic construct
CIKKKKYMN

SEQ ID NO: 4502 - protein, 9 aa, synthetic construct
KRKKQYKVC

SEQ ID NO: 4503 - protein, 9 aa, synthetic construct
KMKTYKIKQ

SEQ ID NO: 4504 - protein, 9 aa, synthetic construct
KHQKKKRSG

SEQ ID NO: 4505 - protein, 9 aa, synthetic construct
YKKMKKAMI

SEQ ID NO: 4506 - protein, 9 aa, synthetic construct
KAKKKKKKF

SEQ ID NO: 4507 - protein, 9 aa, synthetic construct
HVKKKKWNG

SEQ ID NO: 4508 - protein, 9 aa, synthetic construct
KKRCKKHGS

SEQ ID NO: 4509 - protein, 9 aa, synthetic construct
YKKKTKYSS

SEQ ID NO: 4510 - protein, 9 aa, synthetic construct
KKRRYRHAG

SEQ ID NO: 4511 - protein, 9 aa, synthetic construct
KHKKKGGPQ

SEQ ID NO: 4512 - protein, 9 aa, synthetic construct
RKQKKKAWC

SEQ ID NO: 4513 - protein, 9 aa, synthetic construct
KKRKRAPKI

SEQ ID NO: 4514 - protein, 9 aa, synthetic construct
QTEFVCSGK

SEQ ID NO: 4515 - protein, 9 aa, synthetic construct
TEINDTKST

SEQ ID NO: 4516 - protein, 9 aa, synthetic construct
TNLPMEMIP

SEQ ID NO: 4517 - protein, 9 aa, synthetic construct
HPDPTAEYA

SEQ ID NO: 4518 - protein, 9 aa, synthetic construct
NHDVTPREY

SEQ ID NO: 4519 - protein, 9 aa, synthetic construct
EPTACGVEI

SEQ ID NO: 4520 - protein, 9 aa, synthetic construct
EAVQTAEHN

SEQ ID NO: 4521 - protein, 9 aa, synthetic construct
DPNQCWMMN

SEQ ID NO: 4522 - protein, 9 aa, synthetic construct
TWLELDMEC

SEQ ID NO: 4523 - protein, 9 aa, synthetic construct
HATVFDENN

SEQ ID NO: 4524 - protein, 9 aa, synthetic construct
TIPMHDQAK

SEQ ID NO: 4525 - protein, 9 aa, synthetic construct
TWLDKHCVA

SEQ ID NO: 4526 - protein, 9 aa, synthetic construct
PPTVTQCMH

SEQ ID NO: 4527 - protein, 9 aa, synthetic construct
TVPCNGEHS

SEQ ID NO: 4528 - protein, 9 aa, synthetic construct
NEHTDVQGE

SEQ ID NO: 4529 - protein, 9 aa, synthetic construct
HATMCNQKS

SEQ ID NO: 4530 - protein, 9 aa, synthetic construct
TGTVMQKAD

SEQ ID NO: 4531 - protein, 9 aa, synthetic construct
TVPMKGMEE

SEQ ID NO: 4532 - protein, 9 aa, synthetic construct
NMTHTQNEI

SEQ ID NO: 4533 - protein, 9 aa, synthetic construct
DQTLCEEPP

SEQ ID NO: 4534 - protein, 9 aa, synthetic construct
EHTIFGESG

SEQ ID NO: 4535 - protein, 9 aa, synthetic construct
EVENKIYGH

SEQ ID NO: 4536 - protein, 9 aa, synthetic construct
THGSVCRPD

SEQ ID NO: 4537 - protein, 9 aa, synthetic construct
VATPECQAY

SEQ ID NO: 4538 - protein, 9 aa, synthetic construct
GNEPDVQYN

SEQ ID NO: 4539 - protein, 9 aa, synthetic construct
NEHSTGKAC

SEQ ID NO: 4540 - protein, 9 aa, synthetic construct
NTDWLCDMN

SEQ ID NO: 4541 - protein, 9 aa, synthetic construct
TNMMCNEGP

SEQ ID NO: 4542 - protein, 9 aa, synthetic construct
EPDYKVAQP

SEQ ID NO: 4543 - protein, 9 aa, synthetic construct
PETVGYKHC

SEQ ID NO: 4544 - protein, 9 aa, synthetic construct
DTQFLDMVK

SEQ ID NO: 4545 - protein, 9 aa, synthetic construct
NATMYVEER

SEQ ID NO: 4546 - protein, 9 aa, synthetic construct
DVNPRGEAI

SEQ ID NO: 4547 - protein, 9 aa, synthetic construct
GDNVTVEAP

SEQ ID NO: 4548 - protein, 9 aa, synthetic construct
TITCQEARC

SEQ ID NO: 4549 - protein, 9 aa, synthetic construct
SSHNLCCVT

SEQ ID NO: 4550 - protein, 9 aa, synthetic construct
TATAHCMEG

SEQ ID NO: 4551 - protein, 9 aa, synthetic construct
TPFADLCVC

SEQ ID NO: 4552 - protein, 9 aa, synthetic construct
YTDSANNAI

SEQ ID NO: 4553 - protein, 9 aa, synthetic construct
FQMQMHAYA

SEQ ID NO: 4554 - protein, 9 aa, synthetic construct
TTDFAGMVQ

SEQ ID NO: 4555 - protein, 9 aa, synthetic construct
THTCNWAEQ

SEQ ID NO: 4556 - protein, 9 aa, synthetic construct
DALNREEAC

SEQ ID NO: 4557 - protein, 9 aa, synthetic construct
TVENKSADA

SEQ ID NO: 4558 - protein, 9 aa, synthetic construct
TVEMWNYCC

SEQ ID NO: 4559 - protein, 9 aa, synthetic construct
IEPATPHCD

SEQ ID NO: 4560 - protein, 9 aa, synthetic construct
THQNTFLTV

SEQ ID NO: 4561 - protein, 9 aa, synthetic construct
HAVNTCEEQ

SEQ ID NO: 4562 - protein, 9 aa, synthetic construct
MQNPFYEQT

SEQ ID NO: 4563 - protein, 9 aa, synthetic construct
MEQKNETSG

SEQ ID NO: 4564 - protein, 9 aa, synthetic construct
FVTDKEAVA

SEQ ID NO: 4565 - protein, 9 aa, synthetic construct
TCTDIFHQA

SEQ ID NO: 4566 - protein, 9 aa, synthetic construct
VTLMKDSAC

SEQ ID NO: 4567 - protein, 9 aa, synthetic construct
ENEPGQTAC

SEQ ID NO: 4568 - protein, 9 aa, synthetic construct
VYHCPSEED

SEQ ID NO: 4569 - protein, 9 aa, synthetic construct
TTCWINNEG

SEQ ID NO: 4570 - protein, 9 aa, synthetic construct
VQCVCLRNY

SEQ ID NO: 4571 - protein, 9 aa, synthetic construct
YQDTFHEAN

SEQ ID NO: 4572 - protein, 9 aa, synthetic construct
PEQTKACYA

SEQ ID NO: 4573 - protein, 9 aa, synthetic construct
QATPCCEQP

SEQ ID NO: 4574 - protein, 9 aa, synthetic construct
GNEACPKQI

SEQ ID NO: 4575 - protein, 9 aa, synthetic construct
VEHTVCEIC

SEQ ID NO: 4576 - protein, 9 aa, synthetic construct
TEQFAKNSA

SEQ ID NO: 4577 - protein, 9 aa, synthetic construct
TIDVTHAAC

SEQ ID NO: 4578 - protein, 9 aa, synthetic construct
PSTVNHCFT

SEQ ID NO: 4579 - protein, 9 aa, synthetic construct
DHTPGGEPP

SEQ ID NO: 4580 - protein, 9 aa, synthetic construct
TNTPASHDA

SEQ ID NO: 4581 - protein, 9 aa, synthetic construct
TILMKHASQ

SEQ ID NO: 4582 - protein, 9 aa, synthetic construct
EESQTVLIY

SEQ ID NO: 4583 - protein, 9 aa, synthetic construct
SEIASHKLT

SEQ ID NO: 4584 - protein, 9 aa, synthetic construct
HAQMQHCYV

SEQ ID NO: 4585 - protein, 9 aa, synthetic construct
DADTWVMMC

SEQ ID NO: 4586 - protein, 9 aa, synthetic construct
NGTSAPCML

SEQ ID NO: 4587 - protein, 9 aa, synthetic construct
YICPSHNLN

SEQ ID NO: 4588 - protein, 9 aa, synthetic construct
TVEIWNHDT

SEQ ID NO: 4589 - protein, 9 aa, synthetic construct
MILTHTDVK

SEQ ID NO: 4590 - protein, 9 aa, synthetic construct
TNLPDHMSY

SEQ ID NO: 4591 - protein, 9 aa, synthetic construct
ATGQKEMIC

SEQ ID NO: 4592 - protein, 9 aa, synthetic construct
NATFKNEMP

SEQ ID NO: 4593 - protein, 9 aa, synthetic construct
NYQFCNEAA

SEQ ID NO: 4594 - protein, 9 aa, synthetic construct
CQTVHYCPI

SEQ ID NO: 4595 - protein, 9 aa, synthetic construct
NEVIAYCRH

SEQ ID NO: 4596 - protein, 9 aa, synthetic construct
EFDPPNRYH

SEQ ID NO: 4597 - protein, 9 aa, synthetic construct
TVLEMWMMC

SEQ ID NO: 4598 - protein, 9 aa, synthetic construct
MVQATHCSI

SEQ ID NO: 4599 - protein, 9 aa, synthetic construct
NEDVYHSEC

SEQ ID NO: 4600 - protein, 9 aa, synthetic construct
TTVNLNREP

SEQ ID NO: 4601 - protein, 9 aa, synthetic construct
FIPATNAGS

SEQ ID NO: 4602 - protein, 9 aa, synthetic construct
NHDTCNEGW

SEQ ID NO: 4603 - protein, 9 aa, synthetic construct
TNEDQHCAI

SEQ ID NO: 4604 - protein, 9 aa, synthetic construct
PTEQTNAEA

SEQ ID NO: 4605 - protein, 9 aa, synthetic construct
TEPGDHCEY

SEQ ID NO: 4606 - protein, 9 aa, synthetic construct
TVDQMYAIA

SEQ ID NO: 4607 - protein, 9 aa, synthetic construct
TMQSVNKGA

SEQ ID NO: 4608 - protein, 9 aa, synthetic construct
NTENEAHAQ

SEQ ID NO: 4609 - protein, 9 aa, synthetic construct
HAQNREACN

SEQ ID NO: 4610 - protein, 9 aa, synthetic construct
TVEPTFAGY

SEQ ID NO: 4611 - protein, 9 aa, synthetic construct
TMVQHTKSI

SEQ ID NO: 4612 - protein, 9 aa, synthetic construct
YTFQCNAEA

SEQ ID NO: 4613 - protein, 9 aa, synthetic construct
EAQFNSEHT

SEQ ID NO: 4614 - protein, 9 aa, synthetic construct
NQTPGDKDG

SEQ ID NO: 4615 - protein, 9 aa, synthetic construct
EHFNPVEYT

SEQ ID NO: 4616 - protein, 9 aa, synthetic construct
PNEQYGNWI

SEQ ID NO: 4617 - protein, 9 aa, synthetic construct
PPVQVGFAS

SEQ ID NO: 4618 - protein, 9 aa, synthetic construct
TGHMNCEYY

SEQ ID NO: 4619 - protein, 9 aa, synthetic construct
LNTVCYDKY

SEQ ID NO: 4620 - protein, 9 aa, synthetic construct
NQTACYKWD

SEQ ID NO: 4621 - protein, 9 aa, synthetic construct
VAYQKVEPT

SEQ ID NO: 4622 - protein, 9 aa, synthetic construct
VTPPTNQYC

SEQ ID NO: 4623 - protein, 9 aa, synthetic construct
NETDVEMMK

SEQ ID NO: 4624 - protein, 9 aa, synthetic construct
EATGCNESD

SEQ ID NO: 4625 - protein, 9 aa, synthetic construct
VATQCSAER

SEQ ID NO: 4626 - protein, 9 aa, synthetic construct
ATVMTHSAC

SEQ ID NO: 4627 - protein, 9 aa, synthetic construct
TEHQFAQKS

SEQ ID NO: 4628 - protein, 9 aa, synthetic construct
YGEETSMTC

SEQ ID NO: 4629 - protein, 9 aa, synthetic construct
TMEQTHNEY

SEQ ID NO: 4630 - protein, 9 aa, synthetic construct
IPCPTCYGH

SEQ ID NO: 4631 - protein, 9 aa, synthetic construct
EACDGVKIH

SEQ ID NO: 4632 - protein, 9 aa, synthetic construct
DAQCYGLPS

SEQ ID NO: 4633 - protein, 9 aa, synthetic construct
TIEWMNEMY

SEQ ID NO: 4634 - protein, 9 aa, synthetic construct
ETHVQYMPD

SEQ ID NO: 4635 - protein, 9 aa, synthetic construct
HATIRGEHQ

SEQ ID NO: 4636 - protein, 9 aa, synthetic construct
TNEMGVERY

SEQ ID NO: 4637 - protein, 9 aa, synthetic construct
QTQAPDCYA

SEQ ID NO: 4638 - protein, 9 aa, synthetic construct
TWFIYCMEH

SEQ ID NO: 4639 - protein, 9 aa, synthetic construct
NEQYCEHIT

SEQ ID NO: 4640 - protein, 9 aa, synthetic construct
LHCCTCKEY

SEQ ID NO: 4641 - protein, 9 aa, synthetic construct
EFHVCYADN

SEQ ID NO: 4642 - protein, 9 aa, synthetic construct
VTDAYGYEP

SEQ ID NO: 4643 - protein, 9 aa, synthetic construct
TQCMWDNEN

SEQ ID NO: 4644 - protein, 9 aa, synthetic construct
TIMQMHNEG

SEQ ID NO: 4645 - protein, 9 aa, synthetic construct
TNDPLVMEC

SEQ ID NO: 4646 - protein, 9 aa, synthetic construct
TEHCWMYTC

SEQ ID NO: 4647 - protein, 9 aa, synthetic construct
EFQACSKYA

SEQ ID NO: 4648 - protein, 9 aa, synthetic construct
TIQPFMASD

SEQ ID NO: 4649 - protein, 9 aa, synthetic construct
GLPQCNEHR

SEQ ID NO: 4650 - protein, 9 aa, synthetic construct
NETWVVCMK

SEQ ID NO: 4651 - protein, 9 aa, synthetic construct
THDVRCFFA

SEQ ID NO: 4652 - protein, 9 aa, synthetic construct
VLTNEEKDC

SEQ ID NO: 4653 - protein, 9 aa, synthetic construct
ELTFHNEYP

SEQ ID NO: 4654 - protein, 9 aa, synthetic construct
DTVNMYLRQ

SEQ ID NO: 4655 - protein, 9 aa, synthetic construct
EVTVWHEHN

SEQ ID NO: 4656 - protein, 9 aa, synthetic construct
CVTAEHNWI

SEQ ID NO: 4657 - protein, 9 aa, synthetic construct
TEHAYVKAI

SEQ ID NO: 4658 - protein, 9 aa, synthetic construct
SETHTCYGV

SEQ ID NO: 4659 - protein, 9 aa, synthetic construct
ATHLVQMYQ

SEQ ID NO: 4660 - protein, 9 aa, synthetic construct
PAQAWVQTC

SEQ ID NO: 4661 - protein, 9 aa, synthetic construct
HAQATFEVC

SEQ ID NO: 4662 - protein, 9 aa, synthetic construct
VHNAQVEMA

SEQ ID NO: 4663 - protein, 9 aa, synthetic construct
DVENLCAQA

SEQ ID NO: 4664 - protein, 9 aa, synthetic construct
PETVNHKHA

SEQ ID NO: 4665 - protein, 9 aa, synthetic construct
NTCPKANEG

SEQ ID NO: 4666 - protein, 9 aa, synthetic construct
VTFMMNQCK

SEQ ID NO: 4667 - protein, 9 aa, synthetic construct
VMTPPNEYC

SEQ ID NO: 4668 - protein, 9 aa, synthetic construct
EVQIYSEAP

SEQ ID NO: 4669 - protein, 9 aa, synthetic construct
YTDAFANEH

SEQ ID NO: 4670 - protein, 9 aa, synthetic construct
FALCCNEPQ

SEQ ID NO: 4671 - protein, 9 aa, synthetic construct
FVTIYAEAC

SEQ ID NO: 4672 - protein, 9 aa, synthetic construct
IATPPDEQC

SEQ ID NO: 4673 - protein, 9 aa, synthetic construct
DTHWLCCEV

SEQ ID NO: 4674 - protein, 9 aa, synthetic construct
TPGEYHMEC

SEQ ID NO: 4675 - protein, 9 aa, synthetic construct
TATVECCRW

SEQ ID NO: 4676 - protein, 9 aa, synthetic construct
LWLFHPFAK

SEQ ID NO: 4677 - protein, 9 aa, synthetic construct
DITPACLHA

SEQ ID NO: 4678 - protein, 9 aa, synthetic construct
PETWLGEPC

SEQ ID NO: 4679 - protein, 9 aa, synthetic construct
YQADCDATP

SEQ ID NO: 4680 - protein, 9 aa, synthetic construct
QNLDKSGAC

SEQ ID NO: 4681 - protein, 9 aa, synthetic construct
NEYVTCQGD

SEQ ID NO: 4682 - protein, 9 aa, synthetic construct
ATQMIWMQH

SEQ ID NO: 4683 - protein, 9 aa, synthetic construct
HATNYVIES

SEQ ID NO: 4684 - protein, 9 aa, synthetic construct
YTCESDREA

SEQ ID NO: 4685 - protein, 9 aa, synthetic construct
NTFNEYAWL

SEQ ID NO: 4686 - protein, 9 aa, synthetic construct
NTLNKNAYG

SEQ ID NO: 4687 - protein, 9 aa, synthetic construct
TVESLNCCP

SEQ ID NO: 4688 - protein, 9 aa, synthetic construct
TMIMWYKGA

SEQ ID NO: 4689 - protein, 9 aa, synthetic construct
FAQPVYEGQ

SEQ ID NO: 4690 - protein, 9 aa, synthetic construct
VEEATCFVT

SEQ ID NO: 4691 - protein, 9 aa, synthetic construct
DATMIMYYQ

SEQ ID NO: 4692 - protein, 9 aa, synthetic construct
NHTNWCESS

SEQ ID NO: 4693 - protein, 9 aa, synthetic construct
PTEAITCQA

SEQ ID NO: 4694 - protein, 9 aa, synthetic construct
ASDFICKEC

SEQ ID NO: 4695 - protein, 9 aa, synthetic construct
EDQACNHSN

SEQ ID NO: 4696 - protein, 9 aa, synthetic construct
ETGQNHMCP

SEQ ID NO: 4697 - protein, 9 aa, synthetic construct
TVENWGMAQ

SEQ ID NO: 4698 - protein, 9 aa, synthetic construct
PNENQHQYL

SEQ ID NO: 4699 - protein, 9 aa, synthetic construct
NTEIACQLK

SEQ ID NO: 4700 - protein, 9 aa, synthetic construct
VTQNACLRN

SEQ ID NO: 4701 - protein, 9 aa, synthetic construct
GLDAIYQMK

SEQ ID NO: 4702 - protein, 9 aa, synthetic construct
ATVNDYLRP

SEQ ID NO: 4703 - protein, 9 aa, synthetic construct
MPCAQHALI

SEQ ID NO: 4704 - protein, 9 aa, synthetic construct
ESDATCCTD

SEQ ID NO: 4705 - protein, 9 aa, synthetic construct
TWLCPVEEP

SEQ ID NO: 4706 - protein, 9 aa, synthetic construct
HACQQVEAA

SEQ ID NO: 4707 - protein, 9 aa, synthetic construct
VQTADMQAS

SEQ ID NO: 4708 - protein, 9 aa, synthetic construct
TVEYLVHMP

SEQ ID NO: 4709 - protein, 9 aa, synthetic construct
EVTCNWAQY

SEQ ID NO: 4710 - protein, 9 aa, synthetic construct
NFQVTHKQI

SEQ ID NO: 4711 - protein, 9 aa, synthetic construct
HNTATNDMQ

SEQ ID NO: 4712 - protein, 9 aa, synthetic construct
LNTMMVQIK

SEQ ID NO: 4713 - protein, 9 aa, synthetic construct
VQYQENARP

SEQ ID NO: 4714 - protein, 9 aa, synthetic construct
TSEAPHQYK

SEQ ID NO: 4715 - protein, 9 aa, synthetic construct
VKPEFHNLY

SEQ ID NO: 4716 - protein, 9 aa, synthetic construct
TTTVENEMG

SEQ ID NO: 4717 - protein, 9 aa, synthetic construct
DMQNTNHAI

SEQ ID NO: 4718 - protein, 9 aa, synthetic construct
VETVTDAQC

SEQ ID NO: 4719 - protein, 9 aa, synthetic construct
TMQYAWMSP

SEQ ID NO: 4720 - protein, 9 aa, synthetic construct
NATVFEACN

SEQ ID NO: 4721 - protein, 9 aa, synthetic construct
TATFHYAWP

SEQ ID NO: 4722 - protein, 9 aa, synthetic construct
TPPNDKEEN

SEQ ID NO: 4723 - protein, 9 aa, synthetic construct
TMLNSGEFN

SEQ ID NO: 4724 - protein, 9 aa, synthetic construct
TPEVMHNTA

SEQ ID NO: 4725 - protein, 9 aa, synthetic construct
MVHATNADS

SEQ ID NO: 4726 - protein, 9 aa, synthetic construct
EHTVANEAS

SEQ ID NO: 4727 - protein, 9 aa, synthetic construct
NTNADVAER

SEQ ID NO: 4728 - protein, 9 aa, synthetic construct
HNTNWCEEY

SEQ ID NO: 4729 - protein, 9 aa, synthetic construct
IPVTFNNET

SEQ ID NO: 4730 - protein, 9 aa, synthetic construct
TPNPTDMEI

SEQ ID NO: 4731 - protein, 9 aa, synthetic construct
VEQMYNEPP

SEQ ID NO: 4732 - protein, 9 aa, synthetic construct
VNEFYHQIW

SEQ ID NO: 4733 - protein, 9 aa, synthetic construct
LVDQKNMMQ

SEQ ID NO: 4734 - protein, 9 aa, synthetic construct
TINEFHMQS

SEQ ID NO: 4735 - protein, 9 aa, synthetic construct
TMCFNGEYH

SEQ ID NO: 4736 - protein, 9 aa, synthetic construct
DEHATQCYA

SEQ ID NO: 4737 - protein, 9 aa, synthetic construct
TVNWRGEQA

SEQ ID NO: 4738 - protein, 9 aa, synthetic construct
VPVNPGEHK

SEQ ID NO: 4739 - protein, 9 aa, synthetic construct
VITQTNHEG

SEQ ID NO: 4740 - protein, 9 aa, synthetic construct
VTPWCFEAC

SEQ ID NO: 4741 - protein, 9 aa, synthetic construct
ENTCFYHFD

SEQ ID NO: 4742 - protein, 9 aa, synthetic construct
AINAYNEEH

SEQ ID NO: 4743 - protein, 9 aa, synthetic construct
VAQGFANEA

SEQ ID NO: 4744 - protein, 9 aa, synthetic construct
ATQPTPMAH

SEQ ID NO: 4745 - protein, 9 aa, synthetic construct
TAQNVTEFD

SEQ ID NO: 4746 - protein, 9 aa, synthetic construct
PFQQFNEAI

SEQ ID NO: 4747 - protein, 9 aa, synthetic construct
TFHAFIQYK

SEQ ID NO: 4748 - protein, 9 aa, synthetic construct
TMQMTDQAH

SEQ ID NO: 4749 - protein, 9 aa, synthetic construct
ETVRTGSNC

SEQ ID NO: 4750 - protein, 9 aa, synthetic construct
VEWACTNEQ

SEQ ID NO: 4751 - protein, 9 aa, synthetic construct
EPCPTHKAG

SEQ ID NO: 4752 - protein, 9 aa, synthetic construct
NSEFDVARG

SEQ ID NO: 4753 - protein, 9 aa, synthetic construct
MVTAEWADI

SEQ ID NO: 4754 - protein, 9 aa, synthetic construct
LVHAFYEQR

SEQ ID NO: 4755 - protein, 9 aa, synthetic construct
ATEPPGVES

SEQ ID NO: 4756 - protein, 9 aa, synthetic construct
VECMQHEHY

SEQ ID NO: 4757 - protein, 9 aa, synthetic construct
TFEMFNEGP

SEQ ID NO: 4758 - protein, 9 aa, synthetic construct
LITLCYEFH

SEQ ID NO: 4759 - protein, 9 aa, synthetic construct
MQLPVTMRG

SEQ ID NO: 4760 - protein, 9 aa, synthetic construct
TMDCKWMQC

SEQ ID NO: 4761 - protein, 9 aa, synthetic construct
NACTCNNEH

SEQ ID NO: 4762 - protein, 9 aa, synthetic construct
TNEFMWEKA

SEQ ID NO: 4763 - protein, 9 aa, synthetic construct
HEAQYNEHI

SEQ ID NO: 4764 - protein, 9 aa, synthetic construct
MIGVTNHAP

SEQ ID NO: 4765 - protein, 9 aa, synthetic construct
GEFVTHNLT

SEQ ID NO: 4766 - protein, 9 aa, synthetic construct
ATQHIYDAA

SEQ ID NO: 4767 - protein, 9 aa, synthetic construct
YTQYEVACP

SEQ ID NO: 4768 - protein, 9 aa, synthetic construct
MQTDHMCQK

SEQ ID NO: 4769 - protein, 9 aa, synthetic construct
CENLGVEFK

SEQ ID NO: 4770 - protein, 9 aa, synthetic construct
TSDVAWEGH

SEQ ID NO: 4771 - protein, 9 aa, synthetic construct
TVTAFYEIP

SEQ ID NO: 4772 - protein, 9 aa, synthetic construct
FQTAPHQYC

SEQ ID NO: 4773 - protein, 9 aa, synthetic construct
TVEQCSHAG

SEQ ID NO: 4774 - protein, 9 aa, synthetic construct
ENEPPVTVI

SEQ ID NO: 4775 - protein, 9 aa, synthetic construct
EIQDKHEAL

SEQ ID NO: 4776 - protein, 9 aa, synthetic construct
SNQQCEEVI

SEQ ID NO: 4777 - protein, 9 aa, synthetic construct
SQTIACREN

SEQ ID NO: 4778 - protein, 9 aa, synthetic construct
MQTPSHKSA

SEQ ID NO: 4779 - protein, 9 aa, synthetic construct
TEERDGNAC

SEQ ID NO: 4780 - protein, 9 aa, synthetic construct
TPDMKGYQP

SEQ ID NO: 4781 - protein, 9 aa, synthetic construct
NTESKGEAC

SEQ ID NO: 4782 - protein, 9 aa, synthetic construct
EQTVFHRLC

SEQ ID NO: 4783 - protein, 9 aa, synthetic construct
HIDVQCEPD

SEQ ID NO: 4784 - protein, 9 aa, synthetic construct
TPVQNHHIC

SEQ ID NO: 4785 - protein, 9 aa, synthetic construct
PSDALTFAI

SEQ ID NO: 4786 - protein, 9 aa, synthetic construct
EQGAFCGEP

SEQ ID NO: 4787 - protein, 9 aa, synthetic construct
DENWGVEYS

SEQ ID NO: 4788 - protein, 9 aa, synthetic construct
EHVQCDAID

SEQ ID NO: 4789 - protein, 9 aa, synthetic construct
PETFAGVQA

SEQ ID NO: 4790 - protein, 9 aa, synthetic construct
ENEMCPMMN

SEQ ID NO: 4791 - protein, 9 aa, synthetic construct
DKELCNESC

SEQ ID NO: 4792 - protein, 9 aa, synthetic construct
TATPHQKLA

SEQ ID NO: 4793 - protein, 9 aa, synthetic construct
VEHCYNEGF

SEQ ID NO: 4794 - protein, 9 aa, synthetic construct
GETVHACKI

SEQ ID NO: 4795 - protein, 9 aa, synthetic construct
NHTPTDQIA

SEQ ID NO: 4796 - protein, 9 aa, synthetic construct
NEFVTHYQT

SEQ ID NO: 4797 - protein, 9 aa, synthetic construct
TNLNYFHYA

SEQ ID NO: 4798 - protein, 9 aa, synthetic construct
MQNADMTAI

SEQ ID NO: 4799 - protein, 9 aa, synthetic construct
TEVINEASH

SEQ ID NO: 4800 - protein, 9 aa, synthetic construct
TPDNLHEGY

SEQ ID NO: 4801 - protein, 9 aa, synthetic construct
TADSKVEPN

SEQ ID NO: 4802 - protein, 9 aa, synthetic construct
VEVQCNEQT

SEQ ID NO: 4803 - protein, 9 aa, synthetic construct
GVQCNTLMI

SEQ ID NO: 4804 - protein, 9 aa, synthetic construct
NTLNLVAKD

SEQ ID NO: 4805 - protein, 9 aa, synthetic construct
NTPQLHNEI

SEQ ID NO: 4806 - protein, 9 aa, synthetic construct
APTPTCCSA

SEQ ID NO: 4807 - protein, 9 aa, synthetic construct
TITFCYKSD

SEQ ID NO: 4808 - protein, 9 aa, synthetic construct
IIPPDVQMK

SEQ ID NO: 4809 - protein, 9 aa, synthetic construct
EATVTNDFY

SEQ ID NO: 4810 - protein, 9 aa, synthetic construct
DVEPLVATC

SEQ ID NO: 4811 - protein, 9 aa, synthetic construct
VQCPLYMHP

SEQ ID NO: 4812 - protein, 9 aa, synthetic construct
TSEQKHEAS

SEQ ID NO: 4813 - protein, 9 aa, synthetic construct
PVTPYGEEL

SEQ ID NO: 4814 - protein, 9 aa, synthetic construct
THPMAYKEQ

SEQ ID NO: 4815 - protein, 9 aa, synthetic construct
YAQPCTEFP

SEQ ID NO: 4816 - protein, 9 aa, synthetic construct
DVHAKYMAH

SEQ ID NO: 4817 - protein, 9 aa, synthetic construct
FQTINDKSA

SEQ ID NO: 4818 - protein, 9 aa, synthetic construct
TDHWEMKPI

SEQ ID NO: 4819 - protein, 9 aa, synthetic construct
TNEFQNMQY

SEQ ID NO: 4820 - protein, 9 aa, synthetic construct
GYQPWHECI

SEQ ID NO: 4821 - protein, 9 aa, synthetic construct
DHTQLVREA

SEQ ID NO: 4822 - protein, 9 aa, synthetic construct
EVTADNHEN

SEQ ID NO: 4823 - protein, 9 aa, synthetic construct
TIYPAGEAQ

SEQ ID NO: 4824 - protein, 9 aa, synthetic construct
VLDNTHNEA

SEQ ID NO: 4825 - protein, 9 aa, synthetic construct
VATPTCYGN

SEQ ID NO: 4826 - protein, 9 aa, synthetic construct
VTPNEYLPG

SEQ ID NO: 4827 - protein, 9 aa, synthetic construct
TGQATEMQN

SEQ ID NO: 4828 - protein, 9 aa, synthetic construct
VEQCLVAAC

SEQ ID NO: 4829 - protein, 9 aa, synthetic construct
VPMQCDVDA

SEQ ID NO: 4830 - protein, 9 aa, synthetic construct
SETVWMKHA

SEQ ID NO: 4831 - protein, 9 aa, synthetic construct
TILVCCQAY

SEQ ID NO: 4832 - protein, 9 aa, synthetic construct
PILFHNETP

SEQ ID NO: 4833 - protein, 9 aa, synthetic construct
VTECPVEQP

SEQ ID NO: 4834 - protein, 9 aa, synthetic construct
DIIQCVLVT

SEQ ID NO: 4835 - protein, 9 aa, synthetic construct
YQAPPHATC

SEQ ID NO: 4836 - protein, 9 aa, synthetic construct
GSDACYKFQ

SEQ ID NO: 4837 - protein, 9 aa, synthetic construct
TIPQNTAPV

SEQ ID NO: 4838 - protein, 9 aa, synthetic construct
TDVQGHMCI

SEQ ID NO: 4839 - protein, 9 aa, synthetic construct
YQCPPDRHA

SEQ ID NO: 4840 - protein, 9 aa, synthetic construct
TVLCGERIH

SEQ ID NO: 4841 - protein, 9 aa, synthetic construct
GPTAEACFC

SEQ ID NO: 4842 - protein, 9 aa, synthetic construct
NEQSCTAHI

SEQ ID NO: 4843 - protein, 9 aa, synthetic construct
TNLIMCMYV

SEQ ID NO: 4844 - protein, 9 aa, synthetic construct
TSAPYVEEP

SEQ ID NO: 4845 - protein, 9 aa, synthetic construct
HMLIYGNYH

SEQ ID NO: 4846 - protein, 9 aa, synthetic construct
NETDCYASA

SEQ ID NO: 4847 - protein, 9 aa, synthetic construct
TAEMVVHCA

SEQ ID NO: 4848 - protein, 9 aa, synthetic construct
DGTPMVRYY

SEQ ID NO: 4849 - protein, 9 aa, synthetic construct
TQMASYAEH

SEQ ID NO: 4850 - protein, 9 aa, synthetic construct
TEVTFNLHQ

SEQ ID NO: 4851 - protein, 9 aa, synthetic construct
TVEMTCMMY

SEQ ID NO: 4852 - protein, 9 aa, synthetic construct
EHLCNTKAA

SEQ ID NO: 4853 - protein, 9 aa, synthetic construct
QHQAFHEAC

SEQ ID NO: 4854 - protein, 9 aa, synthetic construct
PTTVFHDMP

SEQ ID NO: 4855 - protein, 9 aa, synthetic construct
TAEMNYAIA

SEQ ID NO: 4856 - protein, 9 aa, synthetic construct
HMTCFNEHA

SEQ ID NO: 4857 - protein, 9 aa, synthetic construct
HHTPAGYYQ

SEQ ID NO: 4858 - protein, 9 aa, synthetic construct
TNTPDGEDC

SEQ ID NO: 4859 - protein, 9 aa, synthetic construct
VEEPTHSVQ

SEQ ID NO: 4860 - protein, 9 aa, synthetic construct
TDKHGEMII

SEQ ID NO: 4861 - protein, 9 aa, synthetic construct
VACNWGSLT

SEQ ID NO: 4862 - protein, 9 aa, synthetic construct
TPPILCEMA

SEQ ID NO: 4863 - protein, 9 aa, synthetic construct
YMPVNNEQI

SEQ ID NO: 4864 - protein, 9 aa, synthetic construct
DIEFKCEHY

SEQ ID NO: 4865 - protein, 9 aa, synthetic construct
LVLVPTDAA

SEQ ID NO: 4866 - protein, 9 aa, synthetic construct
THLHICNPD

SEQ ID NO: 4867 - protein, 9 aa, synthetic construct
MAQPGVFYA

SEQ ID NO: 4868 - protein, 9 aa, synthetic construct
TITFVQEVC

SEQ ID NO: 4869 - protein, 9 aa, synthetic construct
TDMPANASE

SEQ ID NO: 4870 - protein, 9 aa, synthetic construct
TVLNCMEEN

SEQ ID NO: 4871 - protein, 9 aa, synthetic construct
FQEDFYALI

SEQ ID NO: 4872 - protein, 9 aa, synthetic construct
QTVVEHCPP

SEQ ID NO: 4873 - protein, 9 aa, synthetic construct
EETAIPADC

SEQ ID NO: 4874 - protein, 9 aa, synthetic construct
MQEPPDMYY

SEQ ID NO: 4875 - protein, 9 aa, synthetic construct
TEHFHNMPK

SEQ ID NO: 4876 - protein, 9 aa, synthetic construct
TELNRGEDI

SEQ ID NO: 4877 - protein, 9 aa, synthetic construct
TPVWQNEGK

SEQ ID NO: 4878 - protein, 9 aa, synthetic construct
TATIRDEDY

SEQ ID NO: 4879 - protein, 9 aa, synthetic construct
VRDSLEART

SEQ ID NO: 4880 - protein, 9 aa, synthetic construct
ETNACDART

SEQ ID NO: 4881 - protein, 9 aa, synthetic construct
TIPPANEHA

SEQ ID NO: 4882 - protein, 9 aa, synthetic construct
SATFPNEYA

SEQ ID NO: 4883 - protein, 9 aa, synthetic construct
EPVPDYEHG

SEQ ID NO: 4884 - protein, 9 aa, synthetic construct
AADTVHMQY

SEQ ID NO: 4885 - protein, 9 aa, synthetic construct
VTFIEHLNQ

SEQ ID NO: 4886 - protein, 9 aa, synthetic construct
TGLIFAEMG

SEQ ID NO: 4887 - protein, 9 aa, synthetic construct
HVEFIGSAY

SEQ ID NO: 4888 - protein, 9 aa, synthetic construct
TIQCPCEAY

SEQ ID NO: 4889 - protein, 9 aa, synthetic construct
AEGVTHAII

SEQ ID NO: 4890 - protein, 9 aa, synthetic construct
EPNVTVAAS

SEQ ID NO: 4891 - protein, 9 aa, synthetic construct
NTVEPDNQA

SEQ ID NO: 4892 - protein, 9 aa, synthetic construct
NWLVEWKAD

SEQ ID NO: 4893 - protein, 9 aa, synthetic construct
TILPVYEHP

SEQ ID NO: 4894 - protein, 9 aa, synthetic construct
VTVMIHAIC

SEQ ID NO: 4895 - protein, 9 aa, synthetic construct
VSMQMHAKC

SEQ ID NO: 4896 - protein, 9 aa, synthetic construct
TITFLCEED

SEQ ID NO: 4897 - protein, 9 aa, synthetic construct
STQKCYEHG

SEQ ID NO: 4898 - protein, 9 aa, synthetic construct
TWLVCCNKS

SEQ ID NO: 4899 - protein, 9 aa, synthetic construct
TSTVENMDP

SEQ ID NO: 4900 - protein, 9 aa, synthetic construct
MIEPCGMLQ

SEQ ID NO: 4901 - protein, 9 aa, synthetic construct
TECCNGESD

SEQ ID NO: 4902 - protein, 9 aa, synthetic construct
IATVHCMMK

SEQ ID NO: 4903 - protein, 9 aa, synthetic construct
VTEMVHAAY

SEQ ID NO: 4904 - protein, 9 aa, synthetic construct
NEQHTVEMR

SEQ ID NO: 4905 - protein, 9 aa, synthetic construct
NECFKVEHD

SEQ ID NO: 4906 - protein, 9 aa, synthetic construct
QILMKCETV

SEQ ID NO: 4907 - protein, 9 aa, synthetic construct
HATFNCEVQ

SEQ ID NO: 4908 - protein, 9 aa, synthetic construct
TEEMLVCPP

SEQ ID NO: 4909 - protein, 9 aa, synthetic construct
TQHALDMAR

SEQ ID NO: 4910 - protein, 9 aa, synthetic construct
TVFLHAHIA

SEQ ID NO: 4911 - protein, 9 aa, synthetic construct
EEQGEKATI

SEQ ID NO: 4912 - protein, 9 aa, synthetic construct
YSAVQDEER

SEQ ID NO: 4913 - protein, 9 aa, synthetic construct
AWVATCNDQ

SEQ ID NO: 4914 - protein, 9 aa, synthetic construct
EHNSTYEFD

SEQ ID NO: 4915 - protein, 9 aa, synthetic construct
ENEMMQNDT

SEQ ID NO: 4916 - protein, 9 aa, synthetic construct
TVLVHGMEN

SEQ ID NO: 4917 - protein, 9 aa, synthetic construct
TTFAKNEGC

SEQ ID NO: 4918 - protein, 9 aa, synthetic construct
TMGVQCMEC

SEQ ID NO: 4919 - protein, 9 aa, synthetic construct
LTEPLDRAA

SEQ ID NO: 4920 - protein, 9 aa, synthetic construct
EIDPACRHT

SEQ ID NO: 4921 - protein, 9 aa, synthetic construct
VTCQNEAAC

SEQ ID NO: 4922 - protein, 9 aa, synthetic construct
PFTVAYEGN

SEQ ID NO: 4923 - protein, 9 aa, synthetic construct
ETDAFHAYA

SEQ ID NO: 4924 - protein, 9 aa, synthetic construct
VRLNFCEFD

SEQ ID NO: 4925 - protein, 9 aa, synthetic construct
AITDKNEGC

SEQ ID NO: 4926 - protein, 9 aa, synthetic construct
YHCPFGMQP

SEQ ID NO: 4927 - protein, 9 aa, synthetic construct
YAEQFTAKI

SEQ ID NO: 4928 - protein, 9 aa, synthetic construct
ENTALNDCG

SEQ ID NO: 4929 - protein, 9 aa, synthetic construct
DITNLCESC

SEQ ID NO: 4930 - protein, 9 aa, synthetic construct
ERLPWVQCD

SEQ ID NO: 4931 - protein, 9 aa, synthetic construct
SITCPGESY

SEQ ID NO: 4932 - protein, 9 aa, synthetic construct
TDTVFPMDR

SEQ ID NO: 4933 - protein, 9 aa, synthetic construct
DRLNFCEHC

SEQ ID NO: 4934 - protein, 9 aa, synthetic construct
ATDAPCEYG

SEQ ID NO: 4935 - protein, 9 aa, synthetic construct
TKLYHYMET

SEQ ID NO: 4936 - protein, 9 aa, synthetic construct
SETCKYAIC

SEQ ID NO: 4937 - protein, 9 aa, synthetic construct
HTVCCEFEG

SEQ ID NO: 4938 - protein, 9 aa, synthetic construct
NTPFHDCYG

SEQ ID NO: 4939 - protein, 9 aa, synthetic construct
FAQITEKHA

SEQ ID NO: 4940 - protein, 9 aa, synthetic construct
MHTSLVEPC

SEQ ID NO: 4941 - protein, 9 aa, synthetic construct
TICPFDENG

SEQ ID NO: 4942 - protein, 9 aa, synthetic construct
AEPQKHEAC

SEQ ID NO: 4943 - protein, 9 aa, synthetic construct
HSEQNGEPR

SEQ ID NO: 4944 - protein, 9 aa, synthetic construct
TPQNLNHAH

SEQ ID NO: 4945 - protein, 9 aa, synthetic construct
TVHTCLEAG

SEQ ID NO: 4946 - protein, 9 aa, synthetic construct
GPESPVNEN

SEQ ID NO: 4947 - protein, 9 aa, synthetic construct
EHQFTCEAC

SEQ ID NO: 4948 - protein, 9 aa, synthetic construct
GSHAWMQVT

SEQ ID NO: 4949 - protein, 9 aa, synthetic construct
TMQMCFKYA

SEQ ID NO: 4950 - protein, 9 aa, synthetic construct
PILPCKEHC

SEQ ID NO: 4951 - protein, 9 aa, synthetic construct
ATDNKNHSE

SEQ ID NO: 4952 - protein, 9 aa, synthetic construct
TVHLCYADI

SEQ ID NO: 4953 - protein, 9 aa, synthetic construct
ENDFINYGR

SEQ ID NO: 4954 - protein, 9 aa, synthetic construct
TVLPNYEHA

SEQ ID NO: 4955 - protein, 9 aa, synthetic construct
LVTNACVEI

SEQ ID NO: 4956 - protein, 9 aa, synthetic construct
THQPFCKHA

SEQ ID NO: 4957 - protein, 9 aa, synthetic construct
PEQWYGSAI

SEQ ID NO: 4958 - protein, 9 aa, synthetic construct
WVTMHQCCK

SEQ ID NO: 4959 - protein, 9 aa, synthetic construct
MEQATWECC

SEQ ID NO: 4960 - protein, 9 aa, synthetic construct
TATFQCCYQ

SEQ ID NO: 4961 - protein, 9 aa, synthetic construct
VQDAIYCYA

SEQ ID NO: 4962 - protein, 9 aa, synthetic construct
ERDACLEIT

SEQ ID NO: 4963 - protein, 9 aa, synthetic construct
TVEMFAKHY

SEQ ID NO: 4964 - protein, 9 aa, synthetic construct
ENETHYKDI

SEQ ID NO: 4965 - protein, 9 aa, synthetic construct
TENPFHEQP

SEQ ID NO: 4966 - protein, 9 aa, synthetic construct
ETSKPHYGC

SEQ ID NO: 4967 - protein, 9 aa, synthetic construct
IVTNKNECC

SEQ ID NO: 4968 - protein, 9 aa, synthetic construct
YQTWPGRDS

SEQ ID NO: 4969 - protein, 9 aa, synthetic construct
NIVLCNEHT

SEQ ID NO: 4970 - protein, 9 aa, synthetic construct
ETVSTHAIY

SEQ ID NO: 4971 - protein, 9 aa, synthetic construct
DQCATQNAI

SEQ ID NO: 4972 - protein, 9 aa, synthetic construct
EVVQNHMIP

SEQ ID NO: 4973 - protein, 9 aa, synthetic construct
QAVHCKEAC

SEQ ID NO: 4974 - protein, 9 aa, synthetic construct
ENEFTCCYK

SEQ ID NO: 4975 - protein, 9 aa, synthetic construct
EWLNNSAHA

SEQ ID NO: 4976 - protein, 9 aa, synthetic construct
YGDAYHAST

SEQ ID NO: 4977 - protein, 9 aa, synthetic construct
EVLACDKEG

SEQ ID NO: 4978 - protein, 9 aa, synthetic construct
NQTDFAQQC

SEQ ID NO: 4979 - protein, 9 aa, synthetic construct
TSENMIESP

SEQ ID NO: 4980 - protein, 9 aa, synthetic construct
DATFQDCYA

SEQ ID NO: 4981 - protein, 9 aa, synthetic construct
MQYQVHAAP

SEQ ID NO: 4982 - protein, 9 aa, synthetic construct
MQTMCNDKY

SEQ ID NO: 4983 - protein, 9 aa, synthetic construct
TPVIFNEVG

SEQ ID NO: 4984 - protein, 9 aa, synthetic construct
ATQNIMAGN

SEQ ID NO: 4985 - protein, 9 aa, synthetic construct
TEQMCSKYA

SEQ ID NO: 4986 - protein, 9 aa, synthetic construct
NEQWCYKHP

SEQ ID NO: 4987 - protein, 9 aa, synthetic construct
NYTVIHYEA

SEQ ID NO: 4988 - protein, 9 aa, synthetic construct
FQCPSGERA

SEQ ID NO: 4989 - protein, 9 aa, synthetic construct
YSTCPNECN

SEQ ID NO: 4990 - protein, 9 aa, synthetic construct
TVLPMIEER

SEQ ID NO: 4991 - protein, 9 aa, synthetic construct
THNTFGYAC

SEQ ID NO: 4992 - protein, 9 aa, synthetic construct
TNEVTCQKT

SEQ ID NO: 4993 - protein, 9 aa, synthetic construct
SKPPGSEQS

SEQ ID NO: 4994 - protein, 9 aa, synthetic construct
DQHCLWEAC

SEQ ID NO: 4995 - protein, 9 aa, synthetic construct
TNMATDEYC

SEQ ID NO: 4996 - protein, 9 aa, synthetic construct
TEEQIGPAC

SEQ ID NO: 4997 - protein, 9 aa, synthetic construct
TGEMFNKSS

SEQ ID NO: 4998 - protein, 9 aa, synthetic construct
TNFQADEPR

SEQ ID NO: 4999 - protein, 9 aa, synthetic construct
VIQQFKEAC

SEQ ID NO: 5000 - protein, 9 aa, synthetic construct
STVSYHNEA

SEQ ID NO: 5001 - protein, 9 aa, synthetic construct
NLLPDVERG

SEQ ID NO: 5002 - protein, 9 aa, synthetic construct
EVQPGDKCY

SEQ ID NO: 5003 - protein, 9 aa, synthetic construct
NEDVTPCEC

SEQ ID NO: 5004 - protein, 9 aa, synthetic construct
TWPPWCNLI

SEQ ID NO: 5005 - protein, 9 aa, synthetic construct
TVHACKNEF

SEQ ID NO: 5006 - protein, 9 aa, synthetic construct
NTDWLTHEA

SEQ ID NO: 5007 - protein, 9 aa, synthetic construct
EPDANYCYS

SEQ ID NO: 5008 - protein, 9 aa, synthetic construct
QATSTNHDA

SEQ ID NO: 5009 - protein, 9 aa, synthetic construct
DTQNVEMAA

SEQ ID NO: 5010 - protein, 9 aa, synthetic construct
GLVAVHEEC

SEQ ID NO: 5011 - protein, 9 aa, synthetic construct
PEQTCYEMT

SEQ ID NO: 5012 - protein, 9 aa, synthetic construct
NWLDGDQAC

SEQ ID NO: 5013 - protein, 9 aa, synthetic construct
VTTVMHAIN
